(19) United States
(12) Patent Application Publication
(10) Pub. No.: US 2025/0262327 A1
(43) Pub. Date: Aug. 21, 2025

(54) COMPOSITIONS AND METHODS FOR TREATING DOMINANT OPTIC ATROPHY AND X-LINKED RETINOSCHISIS

(71) Applicant: Abeona Therapeutics Inc., Cleveland, OH (US)

(72) Inventor: Linas PADEGIMAS, Mayfield, OH (US)

(21) Appl. No.: 18/857,323

(22) PCT Filed: Apr. 18, 2023
(86) PCT No.: PCT/US2023/065877

§ 371 Date: Oct. 16, 2024

Related U.S. Application Data
(60) Provisional application No. 63/332,015, filed on Apr. 18, 2022.

(51) Int. Cl. A61K 48/00; C12N 15/86

(52) U.S. Cl. CPC A61K 48/0058; C12N 15/86; C12N 2750/14143

(57) ABSTRACT

Provided herein are recombinant AAV vectors, AAV viral vectors, capsid proteins, and administration methods for improved gene therapy, and methods for their manufacture and use. These AAV vectors may be used for treating retinoschisis (e.g., X-linked Retinoschisis) or Dominant Optic Atrophy (DOA).

### CROSS-REFERENCE TO RELATED APPLICATIONS

[0001] This application claims the benefit of U.S. Provisional Application No. 63/332,015, filed Apr. 18, 2022, the content of which is incorporated by reference in its entirety.

### REFERENCE TO AN ELECTRONIC SEQUENCE LISTING

[0002] The content of the electronic sequence listing (ABEO_009_01WO_SeqList_ST26.xml; Size: 732,965 bytes; and Date of Creation: Apr. 13, 2023) is herein incorporated by reference in its entirety.

### BACKGROUND

[0003] X-linked retinoschisis (XLRS) is a rare, monogenic disease that results in severe visual impairment. While female carriers are asymptomatic, affected males usually begin exhibiting disease symptoms within the first decade, and occasionally during infancy. The disease results from mutations in the RS1 gene, which is expressed in photoreceptors and retinal bipolar cells. In individuals with XLRS, cavities develop where the adhesion of adjacent retinal layers is disrupted, leading to discontinuity within the retinal circuitry, photoreceptor degeneration, and impaired visual acuity. The current standard of care for XLRS patients is palliative and involves correction of refractive errors, low-vision aids, and genetic counseling. Complications such as retinal detachment (up to 22% of patients) and vitreal hemorrhage (up to 40% of patients) are most frequent in the later stages of disease and can be treated surgically. Early intervention via gene therapy has significant potential to reverse or stabilize disease progression at early stages of disease and prevent significant vision loss as well as the occurrence of these more severe complications.

[0004] Autosomal Dominant Optic Atrophy (ADOA) results in vision loss in the second to third decade of life. ADOA subjects typically have retinal degeneration, neurological defects, and musculoskeletal complications over time. ADOA caused by Opa1 mutation(s). Opa1 has been shown to be involved in mitochondrial christae structure, mitochondrial fusion, and mitochondrial inner membrane remodeling.

[0005] There is a need for new gene therapies for treating XLRS or ADOA.

### SUMMARY

[0006] The present disclosure relates generally to the field of gene therapy and in particular, to recombinant adeno-associated viral (AAV) vector particles (also known as AAV viral vectors) with novel expression cassettes, and their use to deliver transgenes to treat or prevent a disease or disorder such as XLRS or ADOA.

[0007] In one aspect, the disclosure provides methods of treating retinoschisis in a subject in need thereof, comprising para-retinal or sub-retinal administration of an AAV viral vector to the subject. In embodiments, the AAV viral vector comprises a photoreceptor-specific promoter operably linked to a transgene encoded by a heterologous nucleic acid. In embodiments, the photoreceptor-specific promoter is selected from the group consisting of a rhodopsin kinase (RK) promoter, a rhodopsin (RHO) promoter, a beta phosphodiesterase (PDE) promoter, and a retinitis pigmentosa (RP1) promoter. In embodiments, the photoreceptor-specific promoter is a rhodopsin kinase (RK) promoter. In embodiments, the RK promoter comprises, consists essentially of, or consists of a nucleic acid sequence having at least 90%, at least 95%, at least 97%, at least 98%, at least 99%, or 100% identity to SEQ ID NO: 196. In embodiments, the method comprises para-retinal administration of the AAV viral vector to the subject. In embodiments, the subject is a human. In embodiments, the AAV viral vector is administered at a dose of about 10¹⁰ to about 1012 viral genome (vg). In embodiments, the retinoschisis is X-linked retinoschisis. In embodiments, the transgene is RS1. In embodiments, the transgene comprises a nucleic acid sequence having at least 90%, at least 95%, at least 97%, at least 98%, at least 99%, or 100% identity to SEQ ID NO: 117. In embodiments, the transgene encodes an amino acid sequence having at least 90%, at least 95%, at least 97%, at least 98%, at least 99%, or 100% identity to SEQ ID NO: 143.

[0008] In one aspect, the disclosure provides methods of treating an ocular disease or disorder in a subject in need thereof, comprising administration of an AAV viral vector to the subject, wherein the AAV viral vector comprises an AAV vector genome, wherein the AAV vector genome comprises, in 5′ to 3′ orientation: (a) a first AAV inverted terminal repeat, (b) a promoter, (c) a heterologous nucleic acid encoding Opa1, (d) a polyadenylation signal, and (e) a second AAV inverted terminal repeat.

[0009] In embodiments, the promoter is a CBh promoter comprising a sequence having at least 90%, at least 95%, at least 97%, at least 98%, at least 99%, or 100% identity to SEQ ID NO: 154. In embodiments, the promoter is a MeCP2 promoter comprising a sequence having at least 90%, at least 95%, at least 97%, at least 98%, at least 99%, or 100% identity to SEQ ID NO: 156.

[0010] In embodiments, the AAV vector genome comprises an intron sequence having at least 90%, at least 95%, at least 97%, at least 98%, at least 99%, or 100% identity to SEQ ID NO: 200 or 227. In embodiments, the intron sequence is located between the promoter and the heterologous nucleic acid encoding Opa1. In embodiments, the intron sequence is located immediately downstream of the promoter, without any additional nucleotide in between.

[0011] In embodiments, the heterologous nucleic acid encoding Opa1 comprises a sequence having at least 90%, at least 95%, at least 97%, at least 98%, at least 99%, or 100% identity to any one of SEQ ID NO: 175, 182 and 184. In embodiments, the heterologous nucleic acid encodes an Opa1 protein comprising an amino acid sequence having at least 90%, at least 95%, at least 97%, at least 98%, at least 99%, or 100% identity to any one of SEQ ID NO: 180, 183 and 185. In embodiments, the heterologous nucleic acid encodes an Opa1 protein comprising an amino acid sequence having at least 90%, at least 95%, at least 97%, at least 98%, at least 99%, or 100% identity to SEQ ID NO: 180.

[0012] In embodiments, the polyadenylation signal comprises a sequence having at least 90%, at least 95%, at least 97%, at least 98%, at least 99%, or 100% identity to SEQ ID NO: 201 or 225.

[0013] In embodiments, the AAV vector genome does not comprise any telomeric repeats sequence.

[0014] In embodiments, the AAV vector genome comprises a first telomeric repeats sequence located between the polyadenylation signal and the second AAV inverted terminal repeat. In embodiments, the first telomeric repeats sequence has at least 90%, at least 95%, at least 97%, at least 98%, at least 99%, or 100% identity to SEQ ID NO: 202. In embodiments, the AAV vector genome comprises a second telomeric repeats sequence located between the first AAV inverted terminal repeat and the promoter. In embodiments, the second telomeric repeats sequence has at least 90%, at least 95%, at least 97%, at least 98%, at least 99%, or 100% identity to SEQ ID NO: 203.

[0015] In embodiments, the first AAV inverted terminal repeat comprises or consists of a sequence having at least 90%, at least 95%, at least 97%, at least 98%, at least 99%, or 100% identity to SEQ ID NO: 253. In embodiments, the second AAV inverted terminal repeat comprises or consists of a sequence having at least 90%, at least 95%, at least 97%, at least 98%, at least 99%, or 100% identity to SEQ ID NO: 254.

[0016] In embodiments, the AAV vector genome comprises, in 5′ to 3′ orientation: (a) the first AAV inverted terminal repeat, (b) the promoter comprising a sequence having at least 90%, at least 95%, at least 97%, at least 98%, at least 99%, or 100% identity to SEQ ID NO: 154, (c) the heterologous nucleic acid encoding Opa1, (d) the polyadenylation signal comprises a sequence having at least 90%, at least 95%, at least 97%, at least 98%, at least 99%, or 100% identity to SEQ ID NO: 201, and (e) the second AAV inverted terminal repeat. In embodiments, the AAV vector genome comprises an intron sequence having at least 90%, at least 95%, at least 97%, at least 98%, at least 99%, or 100% identity to SEQ ID NO: 200. In embodiments, the intron sequence is located between the promoter and the heterologous nucleic acid encoding Opa1. In embodiments, the AAV vector genome comprises a sequence having at least 90%, at least 95%, at least 97%, at least 98%, at least 99%, or 100% identity to SEQ ID NO: 228. In embodiments, the Opa1 protein comprises an amino acid sequence having at least 90%, at least 95%, at least 97%, at least 98%, at least 99%, or 100% identity to SEQ ID NO: 180.

[0017] In embodiments, the AAV vector genome comprises a polynucleotide sequence having at least 90%, at least 95%, at least 97%, at least 98%, at least 99%, or 100% identity to any one of SEQ ID NO: 230-239.

[0018] In embodiments, the ocular disease or disorder is Autosomal Dominant Optic Atrophy.

[0019] In one aspect, the disclosure provides methods of treating an ocular disease or disorder in a subject in need thereof, comprising administration of an AAV viral vector to the subject, wherein the AAV viral vector comprises an AAV vector genome, wherein the AAV vector genome comprises, in 5′ to 3′ orientation: (a) a first AAV inverted terminal repeat, (b) a promoter, (c) a heterologous nucleic acid encoding RS1, (d) a polyadenylation signal, and (e) a second AAV inverted terminal repeat.

[0020] In embodiments, the promoter is a photoreceptor-specific promoter. In embodiments, the photoreceptor-specific promoter is selected from the group consisting of a rhodopsin kinase (RK) promoter, a rhodopsin (Rho) promoter, a beta phosphodiesterase (PDE) promoter, and a retinitis pigmentosa (RP1) promoter. In embodiments, the promoter is a RK promoter comprising a sequence having at least 90%, at least 95%, at least 97%, at least 98%, at least 99%, or 100% identity to SEQ ID NO: 196. In embodiments, the promoter is a Rho promoter comprising a sequence having at least 90%, at least 95%, at least 97%, at least 98%, at least 99%, or 100% identity to SEQ ID NO: 197. In embodiments, the promoter is a PDE promoter comprising a sequence having at least 90%, at least 95%, at least 97%, at least 98%, at least 99%, or 100% identity to SEQ ID NO: 198.

[0021] In embodiments, the promoter is a CBh promoter comprising a sequence having at least 90%, at least 95%, at least 97%, at least 98%, at least 99%, or 100% identity to SEQ ID NO: 154.

[0022] In embodiments, the AAV vector genome comprises an IRBP enhancer sequence upstream of the promoter. In embodiments, the IRBP enhancer sequence has at least 90%, at least 95%, at least 97%, at least 98%, at least 99%, or 100% identity to SEQ ID NO: 199. In embodiments, the IRBP enhancer sequence is located immediately upstream of the promoter, without any additional nucleotide in between.

[0023] In embodiments, the AAV vector genome comprises a CVA-MVM intron sequence having at least 90%, at least 95%, at least 97%, at least 98%, at least 99%, or 100% identity to SEQ ID NO: 226. In embodiments, the CVA-MVM intron sequence is located between the promoter and the heterologous nucleic acid encoding RS1.

[0024] In embodiments, the AAV vector genome comprises an intron sequence having at least 90%, at least 95%, at least 97%, at least 98%, at least 99%, or 100% identity to SEQ ID NO: 200 or 222. In embodiments, the intron is located between the promoter and the heterologous nucleic acid encoding RS1.

[0025] In embodiments, the heterologous nucleic acid encoding RS1 comprises a sequence having at least 90%, at least 95%, at least 97%, at least 98%, at least 99%, or 100% identity to SEQ ID NO: 117. In embodiments, the heterologous nucleic acid encodes an RS1 protein comprising an amino acid sequence having at least 90%, at least 95%, at least 97%, at least 98%, at least 99%, or 100% identity to SEQ ID NO: 143.

[0026] In embodiments, the polyadenylation signal comprises a sequence having at least 90%, at least 95%, at least 97%, at least 98%, at least 99%, or 100% identity to SEQ ID NO: 201 or 225.

[0027] In embodiments, the AAV vector genome does not comprise any telomeric repeats sequence.

[0028] In embodiments, the AAV vector genome comprises a first telomeric repeats sequence located between the polyadenylation signal and the second AAV inverted terminal repeat. In embodiments, the first telomeric repeats sequence has at least 90%, at least 95%, at least 97%, at least 98%, at least 99%, or 100% identity to SEQ ID NO: 203.

[0029] In embodiments, the AAV vector genome comprises a human beta-globin scaffold/matrix attachment region (βGlo_s/MAR) sequence. In embodiments, the βGlo_s/MAR sequence is located between the polyadenylation signal and the second AAV inverted terminal repeat. In embodiments, the βGlo_s/MAR sequence is located between the polyadenylation signal and the first telomeric repeats sequence. In embodiments, the βGlo_s/MAR sequence has at least 90%, at least 95%, at least 97%, at least 98%, at least 99%, or 100% identity to SEQ ID NO: 221.

[0030] In embodiments, the first AAV inverted terminal repeat comprises or consists of a sequence having at least 90%, at least 95%, at least 97%, at least 98%, at least 99%, or 100% identity to SEQ ID NO: 255. In embodiments, the second AAV inverted terminal repeat comprises or consists of a sequence having at least 90%, at least 95%, at least 97%, at least 98%, at least 99%, or 100% identity to SEQ ID NO: 256.

[0031] In embodiments, the AAV vector genome comprises, in 5′ to 3′ orientation: (a) the first AAV inverted terminal repeat, (b) the IRBP enhancer sequence having at least 90%, at least 95%, at least 97%, at least 98%, at least 99%, or 100% identity to SEQ ID NO: 199, (c) the RK promoter comprising a sequence having at least 90%, at least 95%, at least 97%, at least 98%, at least 99%, or 100% identity to SEQ ID NO: 196, (d) the heterologous nucleic acid encoding RS1, (e) the polyadenylation signal comprising a sequence having at least 90%, at least 95%, at least 97%, at least 98%, at least 99%, or 100% identity to SEQ ID NO: 225, and (f) the second AAV inverted terminal repeat.

[0032] In embodiments, the AAV vector genome comprises an intron sequence having at least 90%, at least 95%, at least 97%, at least 98%, at least 99%, or 100% identity to SEQ ID NO: 222. In embodiments, the intron sequence is located between the promoter and the heterologous nucleic acid encoding RS1. In embodiments, the AAV vector genome comprises a CBA sequence of SEQ ID NO: 229, or a sequence having at most 5, at most 4, at most 3, at most 2, or at most 1 mutation(s) thereto. In embodiments, the CBA sequence is located immediately upstream of the intron sequence without any additional nucleotides in between. In embodiments, the AAV vector genome comprises a CBA-MVM intron sequence having at least 90%, at least 95%, at least 97%, at least 98%, at least 99%, or 100% identity to SEQ ID NO: 226. In embodiments, the CVA-MVM intron sequence is located between the promoter and the heterologous nucleic acid encoding RS1.

[0033] In embodiments, the AAV vector genome comprises a sequence having at least 90%, at least 95%, at least 97%, at least 98%, at least 99%, or 100% identity to SEQ ID NO: 224.

[0034] In embodiments, the AAV vector genome comprises a polynucleotide sequence having at least 90%, at least 95%, at least 97%, at least 98%, at least 99%, or 100% identity to any one of SEQ ID NO: 224 and 240-252.

[0035] In embodiments, the ocular disease or disorder is X-linked retinoschisis.

[0036] In embodiments, the AAV viral vector comprises an AAV capsid protein comprising an amino acid sequence that is at least 95% identical to SEQ ID NO: 1-3, 30-34, 49, 67, 84, or 164. In embodiments, the AAV viral vector comprises an AAV capsid protein comprising an amino acid sequence that is at least 98%, at least 99%, at least 99.5%, or 100% identical to SEQ ID NO: 1-3, 30-34, 49, 67, 84 or 164. In embodiments, the AAV viral vector comprises an AAV capsid protein comprising or consisting of an amino acid sequence that is at least 95%, at least 98%, at least 99%, at least 99.5%, or 100% identical to SEQ ID NO: 2.

[0037] In embodiments, the administration is para-retinal administration. In embodiments, the para-retinal administration comprises injecting at a distance of between 0 and 13 millimeters (mm), between 0 and 10 mm, between 0 and 5 mm, or between 0 and 3 mm, from the surface of the retina in the posterior vitreous cavity of the eye.

[0038] In embodiments, the subject is a human.

[0039] In one aspect, the disclosure provides nucleic acids comprising, in 5′ to 3′ orientation: (a) a first AAV inverted terminal repeat, (b) a promoter, (c) a heterologous nucleic acid encoding Opa1, (d) a polyadenylation signal, and (e) a second AAV inverted terminal repeat.

[0040] In embodiments, the promoter is a CBh promoter comprising a sequence having at least 90%, at least 95%, at least 97%, at least 98%, at least 99%, or 100% identity to SEQ ID NO: 154. In embodiments, the promoter is a MeCP2 promoter comprising a sequence having at least 90%, at least 95%, at least 97%, at least 98%, at least 99%, or 100% identity to SEQ ID NO: 156.

[0041] In embodiments, the AAV vector genome comprises an intron sequence having at least 90%, at least 95%, at least 97%, at least 98%, at least 99%, or 100% identity to SEQ ID NO: 200 or 227. In embodiments, the intron sequence is located between the promoter and the heterologous nucleic acid encoding Opa1. In embodiments, the intron sequence is located immediately downstream of the promoter, without any additional nucleotide in between.

[0042] In embodiments, the heterologous nucleic acid encoding Opa1 comprises a sequence having at least 90%, at least 95%, at least 97%, at least 98%, at least 99%, or 100% identity to any one of SEQ ID NO: 175, 182 and 184. In embodiments, the heterologous nucleic acid encodes an Opa1 protein comprising an amino acid sequence having at least 90%, at least 95%, at least 97%, at least 98%, at least 99%, or 100% identity to any one of SEQ ID NO: 180, 183 and 185. In embodiments, the heterologous nucleic acid encodes an Opa1 protein comprising an amino acid sequence having at least 90%, at least 95%, at least 97%, at least 98%, at least 99%, or 100% identity to SEQ ID NO: 180.

[0043] In embodiments, the polyadenylation signal comprises a sequence having at least 90%, at least 95%, at least 97%, at least 98%, at least 99%, or 100% identity to SEQ ID NO: 201 or 225.

[0044] In embodiments, the AAV vector genome does not comprise any telomeric repeats sequence.

[0045] In embodiments, the AAV vector genome comprises a first telomeric repeats sequence located between the polyadenylation signal and the second AAV inverted terminal repeat. In embodiments, the first telomeric repeats sequence has at least 90%, at least 95%, at least 97%, at least 98%, at least 99%, or 100% identity to SEQ ID NO: 202. In embodiments, the AAV vector genome comprises a second telomeric repeats sequence located between the first AAV inverted terminal repeat and the promoter. In embodiments, the second telomeric repeats sequence has at least 90%, at least 95%, at least 97%, at least 98%, at least 99%, or 100% identity to SEQ ID NO: 203.

[0046] In embodiments, the first AAV inverted terminal repeat comprises or consists of a sequence having at least 90%, at least 95%, at least 97%, at least 98%, at least 99%, or 100% identity to SEQ ID NO: 253. In embodiments, the second AAV inverted terminal repeat comprises or consists of a sequence having at least 90%, at least 95%, at least 97%, at least 98%, at least 99%, or 100% identity to SEQ ID NO: 254.

[0047] In embodiments, the AAV vector genome comprises, in 5′ to 3′ orientation: (a) the first AAV inverted terminal repeat, (b) the promoter comprising a sequence having at least 90%, at least 95%, at least 97%, at least 98%, at least 99%, or 100% identity to SEQ ID NO: 154, (c) the heterologous nucleic acid encoding Opa1, (d) the polyadenylation signal comprises a sequence having at least 90%, at least 95%, at least 97%, at least 98%, at least 99%, or 100% identity to SEQ ID NO: 201, and (e) the second AAV inverted terminal repeat.

[0048] In embodiments, the nucleic acid comprising an intron sequence having at least 90%, at least 95%, at least 97%, at least 98%, at least 99%, or 100% identity to SEQ ID NO: 200. In embodiments, the intron sequence is located between the promoter and the heterologous nucleic acid encoding Opa1.

[0049] In embodiments, the Opa1 protein comprises an amino acid sequence having at least 90%, at least 95%, at least 97%, at least 98%, at least 99%, or 100% identity to SEQ ID NO: 180.

[0050] In embodiments, the nucleic acid comprises a sequence having at least 90%, at least 95%, at least 97%, at least 98%, at least 99%, or 100% identity to SEQ ID NO: 228. In embodiments, the nucleic acid comprises a polynucleotide sequence having at least 90%, at least 95%, at least 97%, at least 98%, at least 99%, or 100% identity to any one of SEQ ID NO: 230-239.

[0051] In one aspect, the disclosure provides nucleic acids comprising, in 5′ to 3′ orientation: (a) a first AAV inverted terminal repeat, (b) a promoter, (c) a heterologous nucleic acid encoding RS1, (d) a polyadenylation signal, and (e) a second AAV inverted terminal repeat.

[0052] In embodiments, the promoter is a photoreceptor-specific promoter. In embodiments, the photoreceptor-specific promoter is selected from the group consisting of a rhodopsin kinase (RK) promoter, a rhodopsin (Rho) promoter, a beta phosphodiesterase (PDE) promoter, and a retinitis pigmentosa (RP1) promoter.

[0053] In embodiments, the promoter is a CBh promoter comprising a sequence having at least 90%, at least 95%, at least 97%, at least 98%, at least 99%, or 100% identity to SEQ ID NO: 154.

[0054] In embodiments, the promoter is a RK promoter comprising a sequence having at least 90%, at least 95%, at least 97%, at least 98%, at least 99%, or 100% identity to SEQ ID NO: 196. In embodiments, the promoter is a Rho promoter comprising a sequence having at least 90%, at least 95%, at least 97%, at least 98%, at least 99%, or 100% identity to SEQ ID NO: 197. In embodiments, the promoter is a PDE promoter comprising a sequence having at least 90%, at least 95%, at least 97%, at least 98%, at least 99%, or 100% identity to SEQ ID NO: 198.

[0055] In embodiments, the nucleic acid comprises an IRBP enhancer sequence upstream of the promoter. In embodiments, the IRBP enhancer sequence has at least 90%, at least 95%, at least 97%, at least 98%, at least 99%, or 100% identity to SEQ ID NO: 199. In embodiments, the IRBP enhancer sequence is located immediately upstream of the promoter, without any additional nucleotide in between.

[0056] In embodiments, the AAV vector genome comprises a CVA-MVM intron sequence having at least 90%, at least 95%, at least 97%, at least 98%, at least 99%, or 100% identity to SEQ ID NO: 226. In embodiments, the CVA-MVM intron sequence is located between the promoter and the heterologous nucleic acid encoding RS1.

[0057] In embodiments, the AAV vector genome comprises an intron sequence having at least 90%, at least 95%, at least 97%, at least 98%, at least 99%, or 100% identity to SEQ ID NO: 200 or 222. In embodiments, the intron is located between the promoter and the heterologous nucleic acid encoding RS1.

[0058] In embodiments, the heterologous nucleic acid encoding RS1 comprises a sequence having at least 90%, at least 95%, at least 97%, at least 98%, at least 99%, or 100% identity to SEQ ID NO: 117. In embodiments, the heterologous nucleic acid encodes an RS1 protein comprising an amino acid sequence having at least 90%, at least 95%, at least 97%, at least 98%, at least 99%, or 100% identity to SEQ ID NO: 143.

[0059] In embodiments, the polyadenylation signal comprises a sequence having at least 90%, at least 95%, at least 97%, at least 98%, at least 99%, or 100% identity to SEQ ID NO: 201 or 225.

[0060] In embodiments, the AAV vector genome does not comprise any telomeric repeats sequence.

[0061] In embodiments, the AAV vector genome comprises a first telomeric repeats sequence located between the polyadenylation signal and the second AAV inverted terminal repeat. In embodiments, the first telomeric repeats sequence has at least 90%, at least 95%, at least 97%, at least 98%, at least 99%, or 100% identity to SEQ ID NO: 203.

[0062] In embodiments, the AAV vector genome comprises a human beta-globin scaffold/matrix attachment region (βGlo_s/MAR) sequence. In embodiments, the βGlo_s/MAR sequence is located between the polyadenylation signal and the second AAV inverted terminal repeat. In embodiments, the βGlo_s/MAR sequence is located between the polyadenylation signal and the first telomeric repeats sequence. In embodiments, the βGlo_s/MAR sequence has at least 90%, at least 95%, at least 97%, at least 98%, at least 99%, or 100% identity to SEQ ID NO: 221.

[0063] In embodiments, the first AAV inverted terminal repeat comprises or consists of a sequence having at least 90%, at least 95%, at least 97%, at least 98%, at least 99%, or 100% identity to SEQ ID NO: 255. In embodiments, the second AAV inverted terminal repeat comprises or consists of a sequence having at least 90%, at least 95%, at least 97%, at least 98%, at least 99%, or 100% identity to SEQ ID NO: 256.

[0064] In embodiments, the AAV vector genome comprises, in 5′ to 3′ orientation: (a) the first AAV inverted terminal repeat, (b) the IRBP enhancer sequence having at least 90%, at least 95%, at least 97%, at least 98%, at least 99%, or 100% identity to SEQ ID NO: 199, (c) the RK promoter comprising a sequence having at least 90%, at least 95%, at least 97%, at least 98%, at least 99%, or 100% identity to SEQ ID NO: 196, (d) the heterologous nucleic acid encoding RS1, (e) the polyadenylation signal comprising a sequence having at least 90%, at least 95%, at least 97%, at least 98%, at least 99%, or 100% identity to SEQ ID NO: 225, and (f) the second AAV inverted terminal repeat.

[0065] In embodiments, the nucleic acid comprises an intron sequence having at least 90%, at least 95%, at least 97%, at least 98%, at least 99%, or 100% identity to SEQ ID NO: 222. In embodiments, the intron sequence is located between the promoter and the heterologous nucleic acid encoding RS1.

[0066] In embodiments, the nucleic acid comprises a CBA sequence of SEQ ID NO: 229, or a sequence having at most 5, at most 4, at most 3, at most 2, or at most 1 mutation(s) thereto. In embodiments, the CBA sequence is located immediately upstream of the intron sequence without any additional nucleotides in between. In embodiments, the nucleic acid comprises a CBA-MVM intron sequence having at least 90%, at least 95%, at least 97%, at least 98%, at least 99%, or 100% identity to SEQ ID NO: 226. In embodiments, the CVA-MVM intron sequence is located between the promoter and the heterologous nucleic acid encoding RS1.

[0067] In embodiments, the nucleic acid comprises a sequence having at least 90%, at least 95%, at least 97%, at least 98%, at least 99%, or 100% identity to SEQ ID NO: 224.

[0068] In embodiments, the nucleic acid comprises a polynucleotide sequence having at least 90%, at least 95%, at least 97%, at least 98%, at least 99%, or 100% identity to any one of SEQ ID NO: 224 and 240-252.

[0069] In one aspect, the disclosure provides nucleic acids comprising, in 5′ to 3′ orientation: (a) a promoter, (b) a heterologous nucleic acid encoding a transgene, and (c) a polyadenylation signal, wherein the promoter is a CBh promoter comprising a sequence having at least 90%, at least 95%, at least 97%, at least 98%, at least 99%, or 100% identity to SEQ ID NO: 154, and wherein the polyadenylation signal comprises a sequence having at least 90%, at least 95%, at least 97%, at least 98%, at least 99%, or 100% identity to SEQ ID NO: 201 or 225.

[0070] In embodiments, the nucleic acid comprises an intron sequence having at least 90%, at least 95%, at least 97%, at least 98%, at least 99%, or 100% identity to SEQ ID NO: 200, 222, 226, or 227. In embodiments, the intron is located between the promoter and the heterologous nucleic acid encoding the transgene.

[0071] In embodiments, the nucleic acid comprises a first ITR that is located 5′ to the promoter, and a second ITR that is located 3′ to the polyadenylation signal.

[0072] In embodiments, the nucleic acid does not comprise any telomeric repeats sequence.

[0073] In embodiments, the nucleic acid comprises a first telomeric repeats sequence located between the polyadenylation signal and the second AAV ITR. In embodiments, the first telomeric repeats sequence has at least 90%, at least 95%, at least 97%, at least 98%, at least 99%, or 100% identity to SEQ ID NO: 202. In embodiments, the nucleic acid comprises a second telomeric repeats sequence located between the first AAV inverted terminal repeat and the promoter. In embodiments, the second telomeric repeats sequence has at least 90%, at least 95%, at least 97%, at least 98%, at least 99%, or 100% identity to SEQ ID NO: 203.

[0074] In one aspect, the disclosure provides vectors comprising the nucleic acid of the disclosure.

[0075] In one aspect, the disclosure provides AAV vector genomes comprising the nucleic acid of the disclosure.

[0076] In one aspect, the disclosure provides AAV viral vectors comprising the AAV vector genome of the disclosure. In embodiments, the AAV viral vector comprises the AAV capsid protein comprising an amino acid sequence that is at least 95%, at least 98%, at least 99%, at least 99.5%, or 100% identical to any one of SEQ ID NO: 1-3, 30-34, 49, 84 and 164.

[0077] In one aspect, the disclosure provides methods of expressing a transgene in a retinal cell, comprising delivering the nucleic acid of the disclosure to the retinal cell, or transducing the retinal cell with the AAV viral vector of the disclosure. In embodiments, the retinal cell is a retinal ganglion cell.

[0078] In one aspect, the disclosure provides methods of treating a disease or disorder comprising administering the AAV viral vector of the disclosure to a subject. In embodiments, the AAV viral vector is administered to the subject intra-ocularly, peri-ocularly, intravitreally, para-retinally, or sub-retinally. In embodiments, the disease or disorder is macular degeneration, retinitis pigmentosa, Autosomal Dominant Optic Atrophy, Retinoschisis, Stargardt disease, Bietti's Crystalline Dystrophy or BEST vitelliform macular dystrophy. In embodiments, the disease or disorder is X-linked Retinoschisis.

### BRIEF DESCRIPTION OF THE DRAWINGS

[0079] The patent or application file contains at least one drawing executed in color. Copies of this patent or patent application publication with color drawing(s) will be provided by the Office upon request and payment of the necessary fee.

[0080] FIG. 1 is an illustration of different modes of intraocular administrations (adapted from Yiu et al., Mol Ther Methods Clin Dev. 2020 Jan. 21; 16:179-191, the content of which is incorporated by reference herein in its entirety.)

[0081] FIGS. 2A-2E show AAV viral vector-mediated GFP expression in the eyes of a non-human primate animal model via intravitreal or para-retinal administrations. Scanning laser ophthalmoscopy (SLO) imaging was performed at Day 26 after injection of the indicated AAV viral vector. FIG. 2A shows transduction spread mediated by intravitreal injection of AAV viral vector comprising AAV204 capsid protein. FIG. 2B shows transduction spread mediated by para-retinal injection of AAV viral vector comprising AAV204 capsid protein. FIG. 2C shows transduction spread mediated by para-retinal injection of AAV viral vector comprising AAV8 capsid protein. FIG. 2D shows transduction spread mediated by para-retinal injection of AAV viral vector comprising AAV214 capsid protein. FIG. 2E shows transduction spread mediated by para-retinal injection of AAV viral vector comprising AAV214-D5 capsid protein.

[0082] FIGS. 3A-3F show imaging analysis of retinas after AAV administration. FIG. 3A shows the composite images of retina after AAV204 intravitreal administration. FIG. 3B shows the composite (upper left), rhodopsin (upper right), and zoom-in composite (lower) images of retina after AAV204 para-retinal administration. FIG. 3C shows the composite (upper left), rhodopsin (upper right), and zoom-in composite (lower) images of retina after AAV204 para-retinal administration. FIG. 3D shows the immunohistochemistry analysis of rhodopsin and GFP expression 1-month post para-retinal injection of AAV204 or AAV8 viral vector. FIG. 3E shows rhodopsin and GFP expression in the fovea post para-retinal injection of AAV204 viral vector. FIG. 3F shows rhodopsin and GFP expression along the papillomacular bundle post para-retinal injection of AAV204 viral vector.

[0083] FIGS. 4A-4C show AAV viral vector-mediated GFP expression in the eyes of a non-human primate animal model via sub-retinal administration. SLO imaging was performed at Day 27 after injection of the indicated AAV viral vector. FIG. 4A shows transduction spread mediated by sub-retinal injection of AAV viral vector comprising AAV8 capsid protein. FIG. 4B shows transduction spread mediated by sub-retinal injection of AAV viral vector comprising AAV214 capsid protein. FIG. 4C shows transduction spread mediated by sub-retinal injection of AAV viral vector comprising AAV214-D5 capsid protein. FIG. 4D shows the composite (upper left), rhodopsin (upper right), and zoom-in composite (lower) images of retina after AAV8 subretinal administration. FIG. 4E shows the composite (upper left), rhodopsin (upper right), and zoom-in composite (lower) images of retina after AAV214 subretinal administration. FIG. 4F shows the composite (upper left), rhodopsin (upper right), and zoom-in composite (lower) images of retina after AAV214-D5 subretinal administration.

[0084] FIG. 5 shows a diagram of the VP1, VP2, and VP3 portions of the capsid protein. The VP1- and VP2-specific portions are indicated along with the VP3 portion, which is identical to the VP3 protein produced. The amino acid sequence of AAV214 VP3 (SEQ ID NO: 41) is shown and variable regions I-IX are indicated. The full VP1 protein amino acid sequence for AAV214 is provided as SEQ ID NO: 3.

[0085] FIG. 6 shows an alignment of the VP1 protein amino acid sequences of AAV214 (SEQ ID NO: 3) and AAV214-D5 (SEQ ID NO: 164).

[0086] FIG. 7 shows the design of various Opa1-encoding AAV vector genomes.

[0087] FIG. 8A shows Opa1 expression in 293 cells transfected with each indicated vector.

[0088] FIG. 8B is a chart showing the virus production yield of each indicated vector.

[0089] FIG. 9A and FIG. 9B show Opa1 expression in viral potency tests. FIG. 9C shows protein staining results of cells transfected with each indicated vector.

[0090] FIG. 10A shows a schematic diagram of the proof-of-concept study that evaluates AAV204 viral vectors encoding Opa1. FIG. 10B shows Western analysis of Opa1 and FLAG-tag expression in heterozygous treated mice. FIG. 10C shows Western analysis of Opa1, FLAG-tag, Brn3a and Rho expression. FIG. 10D shows RT-PCR analysis of RNA transcript levels of human Opa1, mouse Opa1, and FLAG-tag in wild-type or Opa1 heterozygous, untreated or treated animals at 2 months post-injection.

[0091] FIG. 11A and FIG. 11B show schematics of the proof-of-concept (POC) studies to evaluate AAV204 viral vectors encoding Opa1.

[0092] FIG. 12A shows a table summary of various RS1-encoding AAV vector genomes.

[0093] FIG. 12B shows the design of various RS1-encoding AAV vector genomes.

[0094] FIG. 13 shows Western analysis of RS1 protein expression.

[0095] FIG. 14A is a chart showing expression of secreted RS1 protein in Lec2 cells transduced with each indicated AAV viral vector. FIG. 14B is a chart showing mRNA expression of target transgene in Lec2 cells transduced with each indicated AAV viral vector. FIG. 14C shows Western analysis of secreted RS1 protein in Lec2 cells transduced with each indicated AAV viral vector. FIG. 14D shows Western analysis comparing the molecular weight of the myc-tagged RS1 and wildtype RS1.

[0096] FIG. 15A shows a diagram of the proof-of-concept (POC) studies to evaluate AAV204 viral vectors encoding RS1. FIG. 15B is a chart showing RS1 protein expression in wild-type mice transduced with the indicated AAV.

[0097] FIG. 16A and FIG. 16B show Western analysis of RS1 expression in mice transduced with the indicated AAV.

[0098] FIG. 17A and FIG. 17B show schematics of the proof-of-concept (POC) studies to evaluate AAV204 viral vectors encoding RS1.

[0099] FIG. 18A is a table showing the different treatment groups for the mouse study of RS1 expression. FIG. 18B shows endogenous mouse RS1 (mRs1) expression as measured by qPCR for Groups 5-8 at the 2 months post-treatment (mpt) timepoint. FIG. 18C shows RS1 expression from virally delivered transgene at the 2 mpt timepoint. The data are log-transformed to facilitate visualization of comparisons with large differences. nd: not detected. FIG. 18D and FIG. 18E show the results of simultaneous detection of endogenous Rs1 and viral-derived myc-RS1 using a highly specific RS1 antibody. The Western analysis is shown in FIG. 18D and quantified in FIG. 18E. The RS1-specific bands in Groups 5 and 6 are larger than the endogenous protein in Group 8 due to the presence of the myc tag. A myc-RS1 positive control, derived from transduced tissue culture cells, is included in the final lane. nd: not detected.

[0100] FIG. 19A shows IHC staining of wildtype (WT) retina at 2 mpt timepoint. FIG. 19B shows IHC staining of untreated mutant retina at 2 mpt timepoint. FIG. 19C shows IHC staining of mutant retina transduced with RS1_46 at 2 mpt timepoint. FIG. 19D shows IHC staining of mutant retina transduced with RS1_46 in the right eye of animal #123 at 2 mpt timepoint. FIG. 19E shows IHC staining of mutant retina transduced with RS1_48 at 2 mpt timepoint. FIG. 19F is a chart showing cone density analysis at p90, 2 mpt timepoint. FIG. 19G shows staining of retina samples. The upper panels A-C show retina samples transduced with AAV204.RK:RS1_28: RS1 is stained in red, and PNA is stained in green to demonstrate the extent of cone degeneration. The bottom panels are higher magnification images showing cone density in a similarly prepared WT retina (section D) and the transduced and untransduced regions of the treated mutant retina (sections E and F, respectively).

[0101] FIG. 20A shows Western analysis of RS1 protein expression. The positive control in the last lane is recombinant RS1 from transfected tissue culture cells. FIG. 20B is a chart showing quantification of band intensity. nd=not detected. FIG. 20C shows IHC of WT retina at 6 mpt timepoint. RS1 expression (red) in WT eyes (group 3) is uniform across the retina and concentrated in photoreceptors. Panels to the right show a higher magnification view of the boxed region. FIG. 20D shows IHC of mutant retina at 6 mpt timepoint. RS1 staining (red) is absent in mutant retinas (group 1). Panels to the right show higher magnification views of the boxed region. In the absence of RS1, retinal vasculature is labeled with the secondary antibody (arrows). FIG. 20E shows IHC of mutant retina treated with RS1_28 at 6 mpt timepoint. RS1 expression (red) is visible in the dorsal retina of this eye from group 2. Higher magnification views of transduced (a) and non-transduced (b) areas are shown to the right. FIG. 20F shows IHC of mutant retina treated with RS1_26 at 6 mpt timepoint. None of the eyes in this group had detectable RS1 expression.

[0102] FIG. 21 is a chart showing quantification of cone density at 6 mpt timepoint. Cone density was measured from sections stained with peanut agglutinin (PNA). Measurements from group 2 are segregated by RS1 expression. Within group 2, individual data points of identical color reflect the RS1-positive and -negative areas of the same section. In four of the five eyes with detectable RS1 expression, the cone density was slightly higher in the area with adjacent RS1 expression. Eyes that had no detectable RS1 expression are represented with black dots.

[0103] FIG. 22A shows OCT imaging of representative eyes at the 6 mpt timepoint. Yellow bars in each image indicate the thickness of the ONL. Arrows show examples of retinal schises that were present in one eye. FIG. 22B is a chart showing quantification analysis of ONL measurements across all groups.

[0104] FIG. 23A shows IHC of WT retina at 6 mpt timepoint. FIG. 23B shows IHC of untreated mutant retina at 6 mpt timepoint. FIG. 23C shows IHC of mutant retina treated with AAV204.CBh:RS1_16 at 6 mpt timepoint. In most eyes treated with AAV204.CBh:RS1_16, a large area of extensive degeneration was seen in the dorsal retina where the bleb would have been. Visible RS1 expression was rare and is not present in this eye. The boxed area, enlarged in the panels on the right, shows improved cone density (PNA staining) despite there being no detectable RS1 staining. FIG. 23D shows IHC of mutant retina treated with AAV204.CBh:RS1_16 at 6 mpt timepoint in one particular eye (with injection injury). On the left, the asterisk shows treated retina with severe injection related injury and RS1 expression (red) throughout the inner retina. On the right shows a deeper section of the same eye showing inner retinal RS1 expression (B′) as well as expression in photoreceptors in the area adjacent to the lesion (B″). In all panels, PNA (gray) labels cone outer segments and Iba1 (green) labels inflammatory cells. FIG. 23E shows IHC of mutant retina treated with AAV204.CBh:RS1_18 at 6 mpt timepoint. In this example, strong RS1 expression was observed in the dorsal photoreceptors and extended into the inner retina (box a). In contrast, RS1 staining in the ventral retina (box b) was absent. Most of the dorsal retina was devoid of cones despite being otherwise structurally intact. However, the area just dorsal to box b was RS1-positive and also cone-enriched compared to the adjacent RS1-negative area. FIG. 23F is a chart summarizing the cone density analysis at 6 mpt timepoint. Cone density was significantly improved in all treated eyes, even in areas where RS1 immunostaining is not detectable. For this analysis, areas of severe degeneration and areas of cone depletion were omitted.

[0105] FIG. 24A is a chart summarizing mean ONL thickness among all groups. For treated eyes, separate measurements were taken for RS1+ and RS1− areas of the retina, and data points of similar color within each group reflect measurements taken from the same section. Areas of severe degeneration were not included. Data from representative eyes in Groups 10 and 11 are shown in FIG. 24B and FIG. 24C, where star shaped labels indicate areas of treated retinas with RS1 expression.

[0106] FIG. 25A shows Western analysis of RS1 protein expression. The positive control in the last lane is recombinant RS1 from transfected tissue culture cells. FIG. 25B is a chart showing quantification of band intensity. nd=not detected.

[0107] FIG. 26A shows OCT imaging of an untreated mutant eye. FIG. 26B shows OCT imaging of a wildtype eye. FIG. 26C shows OCT imaging of a post-operative bleb to confirm a successful injection. FIG. 26D shows OCT imaging of a treated eye 6 months post-injection. FIG. 26E shows OCT imaging of a treated eye 6 months post-injection; here the margin of the bleb was captured. FIG. 26F shows OCT imaging of a treated eye 6 months post-injection. Yellow lines in these figures indicate the thickness of the ONL. FIG. 26G is a chart showing quantification of ONL thickness. FIG. 26H is a paired t-test estimation plot showing the increased ONL thickness in the treated dorsal retina (11D) compared to the untreated ventral retina in the same eye (11V).

[0108] FIG. 27 shows representative flicker ERG at 6 mpt timepoint.

### DETAILED DESCRIPTION

[0109] Some embodiments according to the present disclosure will be described more fully hereinafter. Aspects of the disclosure may, however, be embodied in different forms and should not be construed as limited to the embodiments set forth herein. Rather, these embodiments are provided so that this disclosure will be thorough and complete, and will fully convey the scope of the invention to those skilled in the art. The terminology used in the description herein is for the purpose of describing particular embodiments only and is not intended to be limiting.

[0110] Unless otherwise defined, all terms (including technical and scientific terms) used herein have the same meaning as commonly understood by one of ordinary skill in the art to which this invention belongs. It will be further understood that terms, such as those defined in commonly used dictionaries, should be interpreted as having a meaning that is consistent with their meaning in the context of the present application and relevant art and should not be interpreted in an idealized or overly formal sense unless expressly so defined herein.

[0111] Unless the context indicates otherwise, it is specifically intended that the various features of the invention described herein can be used in any combination. Moreover, the disclosure also contemplates that in embodiments, any feature or combination of features set forth herein can be excluded or omitted. To illustrate, if the specification states that a complex comprises components A, B and C, it is specifically intended that any of A, B or C, or a combination thereof, can be omitted and disclaimed singularly or in any combination.

[0112] Unless explicitly indicated otherwise, all specified embodiments, features, and terms intend to include both the recited embodiment, feature, or term and biological equivalents thereof.

### INCORPORATION BY REFERENCE

[0113] All references, articles, publications, patents, patent publications, and patent applications cited herein are incorporated by reference in their entireties for all purposes. However, mention of any reference, article, publication, patent, patent publication, and patent application cited herein is not, and should not, be taken as an acknowledgment or any form of suggestion that they constitute valid prior art or form part of the common general knowledge in any country in the world.

### Definitions

[0114] The practice of the present technology will employ, unless otherwise indicated, conventional techniques of organic chemistry, pharmacology, immunology, molecular biology, microbiology, cell biology and recombinant DNA, which are within the skill of the art. See, e.g., Sambrook, Fritsch and Maniatis, Molecular Cloning: A Laboratory Manual, 2nd edition (1989); Current Protocols in Molecular Biology (F. M. Ausubel, et al. eds., (1987)); the series Methods in Enzymology (Academic Press, Inc.): PCR 2: A Practical Approach (M. J. MacPherson, B. D. Hames and G. R. Taylor eds. (1995)), Harlow and Lane, eds. (1988) Antibodies, a Laboratory Manual, and Animal Cell Culture (RI. Freshney, ed. (1987)).

[0115] It also is to be understood, although not always explicitly stated, that the reagents described herein are merely exemplary and that equivalents of such are known in the art.

[0116] The term “about,” as used herein when referring to a measurable value such as an amount or concentration and the like, is meant to encompass variations of 10% of the specified amount.

[0117] The terms “acceptable”, “effective”, or “sufficient” when used to describe the selection of any components, ranges, dose forms, etc. disclosed herein intend that said component, range, dose form, etc. is suitable for the disclosed purpose.

[0118] Unless specifically recited, the term “host cell” includes a eukaryotic host cell, including, for example, fungal cells, yeast cells, higher plant cells, insect cells and mammalian cells. Non-limiting examples of eukaryotic host cells include simian, bovine, porcine, murine, rat, avian, reptilian and human, e.g., HEK293 cells and 293T cells.

[0119] The term “isolated” as used herein refers to molecules or biologicals or cellular materials being substantially free from other materials.

[0120] As used herein, the terms “nucleic acid sequence” and “polynucleotide” are used interchangeably to refer to a polymeric form of nucleotides of any length, either ribonucleotides or deoxyribonucleotides. Thus, this term includes, but is not limited to, single-, double-, or multi-stranded DNA or RNA, genomic DNA, cDNA, DNA-RNA hybrids, or a polymer comprising, consisting essentially of, or consisting of purine and pyrimidine bases or other natural, chemically or biochemically modified, non-natural, or derivatized nucleotide bases.

[0121] A “gene” refers to a polynucleotide containing at least one open reading frame (ORF) that is capable of encoding a particular polypeptide or protein. A “gene product” or, alternatively, a “gene expression product” refers to the amino acid sequence (e.g., peptide or polypeptide) generated when a gene is transcribed and translated.

[0122] As used herein, “expression” refers to the two-step process by which polynucleotides are transcribed into mRNA and/or the process by which the transcribed mRNA is subsequently translated into peptides, polypeptides, or proteins. If the polynucleotide is derived from genomic DNA, expression may include splicing of the mRNA in a eukaryotic cell.

[0123] “Under transcriptional control” is a term well understood in the art and indicates that transcription of a polynucleotide sequence, usually a DNA sequence, depends on its being operatively linked to an element that contributes to the initiation of, or promotes, transcription. “Operatively linked” intends that the polynucleotides are arranged in a manner that allows them to function in a cell. In one aspect, this invention provides promoters operatively linked to the downstream sequences.

[0124] The term “encode” as it is applied to polynucleotides refers to a polynucleotide which is said to “encode” a polypeptide if, in its native state or when manipulated by methods well known to those skilled in the art, it can be transcribed to produce the mRNA for the polypeptide and/or a fragment thereof. The antisense strand is the complement of such a nucleic acid, and the encoding sequence can be deduced therefrom.

[0125] The term “promoter” as used herein means a control sequence that is a region of a polynucleotide sequence at which the initiation and rate of transcription of a coding sequence, such as a gene or a transgene, are controlled. Promoters may be constitutive, inducible, repressible, or tissue-specific, for example. Promoters may contain genetic elements at which regulatory proteins and molecules such as RNA polymerase and transcription factors may bind. Non-limiting exemplary promoters include Rous sarcoma virus (RSV) LTR promoter (optionally with the RSV enhancer), a cytomegalovirus (CMV) promoter, an SV40 promoter, a dihydrofolate reductase promoter, a β-actin promoter, a phosphoglycerol kinase (PGK) promoter, a U6 promoter, an H1 promoter, a ubiquitous chicken β-actin hybrid (CBh) promoter, a small nuclear RNA (U1a or U1b) promoter, an MeCP2 promoter, an MeP418 promoter, an MeP426 promoter, a minimal MeCP2 promoter, a VMD2 promoter, an mRho promoter or an EFI promoter.

[0126] Additional non-limiting exemplary promoters provided herein include, but are not limited to EFla, Ubc, human β-actin, CAG, TRE, Ac5, Polyhedrin, CaMKIIa, Gal1, TEF1, GDS, ADH1, Ubi, and α-1-antitrypsin (hAAT). It is known in the art that the nucleotide sequences of such promoters may be modified in order to increase or decrease the efficiency of mRNA transcription. See, e.g., Gao et al. (2018) Mol. Ther.: Nucleic Acids 12:135-145 (modifying TATA box of 7SK, U6 and H1 promoters to abolish RNA polymerase III transcription and stimulate RNA polymerase II-dependent mRNA transcription). Synthetically-derived promoters may be used for ubiquitous or tissue specific expression. Further, virus-derived promoters, some of which are noted above, may be useful in the methods disclosed herein, e.g., CMV, HIV, adenovirus, and AAV promoters. In embodiments, the promoter is used together with an enhancer to increase the transcription efficiency. Non-limiting examples of enhancers include an interstitial retinoid-binding protein (IRBP) enhancer, an RSV enhancer or a CMV enhancer.

[0127] An enhancer is a regulatory element that increases the expression of a target sequence. A “promoter/enhancer” is a polynucleotide that contains sequences capable of providing both promoter and enhancer functions. For example, the long terminal repeats of retroviruses contain both promoter and enhancer functions. The enhancer/promoter may be “endogenous” or “exogenous” or “heterologous.” An “endogenous” enhancer/promoter is one which is naturally linked with a given gene in the genome. An “exogenous” or “heterologous” enhancer/promoter is one which is placed in juxtaposition to a gene by means of genetic manipulation (i.e., molecular biological techniques) such that transcription of that gene is directed by the linked enhancer/promoter. Non-limiting examples of linked enhancer/promoter for use in the methods, compositions and constructs provided herein include a PDE promoter plus IRBP enhancer or a CMV enhancer plus U1a promoter. It is understood in the art that enhancers can operate from a distance and irrespective of their orientation relative to the location of an endogenous or heterologous promoter. It is thus further understood that an enhancer operating at a distance from a promoter is thus “operably linked” to that promoter irrespective of its location in the vector or its orientation relative to the location of the promoter.

[0128] The term “protein”, “peptide” and “polypeptide” are used interchangeably and in their broadest sense to refer to a compound of two or more subunits of amino acids, amino acid analogs or peptidomimetics. The subunits may be linked by peptide bonds. In another aspect, the subunit may be linked by other bonds, e.g., ester, ether, etc. A protein or peptide must contain at least two amino acids and no limitation is placed on the maximum number of amino acids which may comprise, consist essentially of, or consist of a protein's or peptide's sequence. As used herein the term “amino acid” refers to either natural and/or unnatural or synthetic amino acids, including glycine and both the D and L optical isomers, amino acid analogs and peptidomimetics.

[0129] As used herein, the term “signal peptide” or “signal polypeptide” intends an amino acid sequence usually present at the N-terminal end of newly synthesized secretory or membrane polypeptides or proteins. It acts to direct the polypeptide to a specific cellular location, e.g. across a cell membrane, into a cell membrane, or into the nucleus. In embodiments, the signal peptide is removed following localization. Examples of signal peptides are well known in the art. Non-limiting examples are those described in U.S. Pat. Nos. 8,853,381, 5,958,736, and 8,795,965. In embodiments, the signal peptide can be an IDUA signal peptide.

[0130] The terms “equivalent” or “biological equivalent” are used interchangeably when referring to a particular molecule, biological material, or cellular material and intend those having minimal homology while still maintaining desired structure or functionality. Non-limiting examples of equivalent polypeptides include a polypeptide having at least about 60%, at least about 65%, at least about 70%, at least about 75%, at least about 80%, at least about 85%, at least about 90%, at least about 95% identity or at least about 99% identity to a reference polypeptide (for instance, a wild-type polypeptide); or a polypeptide which is encoded by a polynucleotide having at least about 70%, at least about 75%, at least about 80%, at least about 85%, at least about 90%, at least about 95% identity, at least about 97% sequence identity or at least about 99% sequence identity to the reference polynucleotide (for instance, a wild-type polynucleotide).

[0131] “Homology” or “identity” or “similarity” refers to sequence similarity between two peptides or between two nucleic acid molecules. Percent identity can be determined by comparing a position in each sequence that may be aligned for purposes of comparison. When a position in the compared sequence is occupied by the same base or amino acid, then the molecules are identical at that position. A degree of identity between sequences is a function of the number of matching positions shared by the sequences. “Unrelated” or “non-homologous” sequences share less than 40% identity, less than 25% identity, with one of the sequences of the present disclosure. Alignment and percent sequence identity may be determined for the nucleic acid or amino acid sequences provided herein by importing said nucleic acid or amino acid sequences into and using ClustalW (available at genome.jp/tools-bin/clustalw/) and Gonnet (for protein) weight matrix. In embodiments, the ClustalW parameters used for performing nucleic acid sequence alignments using the nucleic acid sequences found herein are generated using the ClustalW (for DNA) weight matrix.

[0132] As used herein, amino acid modifications may be substitutions, deletions or insertions. Amino acid substitutions may be conservative amino acid substitutions or non-conservative amino acid substitutions. A conservative replacement (also called a conservative mutation, a conservative substitution or a conservative variation) is an amino acid replacement in a protein that changes a given amino acid to a different amino acid with similar biochemical properties (e.g., charge, hydrophobicity or size). As used herein, “conservative variations” refer to the replacement of an amino acid residue by another, biologically similar residue. Examples of conservative variations include the substitution of one hydrophobic residue such as isoleucine, valine, leucine or methionine for another; or the substitution of one charged or polar residue for another, such as the substitution of arginine for lysine, glutamic acid for aspartic acid, glutamine for asparagine, and the like. Other illustrative examples of conservative substitutions include the changes of: alanine to serine; asparagine to glutamine or histidine; aspartate to glutamate; cysteine to serine; glycine to proline; histidine to asparagine or glutamine; lysine to arginine, glutamine, or glutamate; phenylalanine to tyrosine, serine to threonine; threonine to serine; tryptophan to tyrosine; tyrosine to tryptophan or phenylalanine; and the like.

[0133] As used herein, the term “vector” refers to a nucleic acid comprising, consisting essentially of, or consisting of an intact replicon such that the vector may be replicated when placed within a cell, for example by a process of transfection, infection, or transformation. It is understood in the art that once inside a cell, a vector may replicate as an extrachromosomal (episomal) element or may be integrated into a host cell chromosome. Vectors may include nucleic acids derived from retroviruses, adenoviruses, herpesvirus, baculoviruses, modified baculoviruses, papovaviruses, or otherwise modified naturally-occurring viruses. Exemplary non-viral vectors for delivering nucleic acid include naked DNA; DNA complexed with cationic lipids, alone or in combination with cationic polymers; anionic and cationic liposomes; DNA-protein complexes and particles comprising, consisting essentially of, or consisting of DNA condensed with cationic polymers such as heterogeneous polylysine, defined-length oligopeptides, and polyethyleneimine, in some cases contained in liposomes; and the use of ternary complexes comprising, consisting essentially of, or consisting of a virus and polylysine-DNA.

[0134] With respect to general recombinant techniques, vectors that contain both a promoter and a cloning site into which a polynucleotide can be operatively linked are well known in the art. Such vectors are capable of transcribing RNA in vitro or in vivo, and are commercially available from sources such as Agilent Technologies (Santa Clara, Calif) and Promega Biotech (Madison, Wis.). In order to optimize expression and/or in vitro transcription, it may be necessary to remove, add or alter 5′ and/or 3′ untranslated portions of cloned transgenes to eliminate extra, potential inappropriate alternative translation initiation codons or other sequences that may interfere with or reduce expression, either at the level of transcription or translation. Alternatively, consensus ribosome binding sites can be inserted immediately 5′ of the start codon to enhance expression.

[0135] A “viral vector” is defined as a recombinantly produced virus or viral particle that contains a polynucleotide to be delivered into a host cell, either in vivo, ex vivo or in vitro. Examples of viral vectors include retroviral vectors, AAV viral vectors, lentiviral vectors, adenovirus vectors, alphavirus vectors and the like. Alphavirus vectors, such as Semliki Forest virus-based vectors and Sindbis virus-based vectors, have also been developed for use in gene therapy and immunotherapy. See, e.g., Schlesinger and Dubensky (1999) Curr. Opin. Biotechnol. 5:434-439 and Ying, et al. (1999) Nat. Med. 5 (7): 823-827.

[0136] As used herein, the term “recombinant expression system” or “recombinant vector” refers to a genetic construct or constructs for the expression of certain genetic material formed by recombination.

[0137] A “gene delivery vehicle” is defined as any molecule that can carry inserted polynucleotides into a host cell. Examples of gene delivery vehicles are liposomes, micelles biocompatible polymers, including natural polymers and synthetic polymers; lipoproteins; polypeptides; polysaccharides; lipopolysaccharides; artificial viral envelopes; metal particles; bacteria; viruses, such as baculoviruses, adenoviruses and retroviruses; bacteriophage, cosmid, plasmid, and fungal vectors; and other recombination vehicles typically used in the art which have been described for expression in a variety of eukaryotic and prokaryotic hosts, and may be used for gene therapy as well as for simple protein expression. Liposomes that also comprise, consist essentially of, or consist of a targeting antibody or fragment thereof can be used in the methods disclosed herein. In addition to the delivery of polynucleotides to a cell or cell population, direct introduction of the proteins described herein to the cell or cell population can be done by the non-limiting technique of protein transfection, alternatively culturing conditions that can enhance the expression and/or promote the activity of the proteins disclosed herein are other non-limiting techniques.

[0138] A polynucleotide disclosed herein can be delivered to a cell or tissue using a gene delivery vehicle. “Gene delivery,” “gene transfer,” “transducing,” and the like as used herein, are terms referring to the introduction of an exogenous polynucleotide (sometimes referred to as a “transgene”) into a host cell, irrespective of the method used for the introduction. Such methods include a variety of well-known techniques such as vector-mediated gene transfer (by, e.g., viral infection/transfection, or various other protein-based or lipid-based gene delivery complexes) as well as techniques facilitating the delivery of “naked” polynucleotides (such as electroporation, “gene gun” delivery and various other techniques used for the introduction of polynucleotides). The introduced polynucleotide may be stably or transiently maintained in the host cell. Stable maintenance typically requires that the introduced polynucleotide either contains an origin of replication compatible with the host cell or integrates into a replicon of the host cell such as an extrachromosomal replicon (e.g., a plasmid) or a nuclear or mitochondrial chromosome. A number of vectors are known to be capable of mediating transfer of genes to mammalian cells, as is known in the art and described herein.

[0139] A “plasmid” is a DNA molecule that is typically separate from and capable of replicating independently of the chromosomal DNA. In many cases, it is circular and double-stranded. Plasmids provide a mechanism for horizontal gene transfer within a population of microbes and typically provide a selective advantage under a given environmental state. Plasmids may carry genes that provide resistance to naturally occurring antibiotics in a competitive environmental niche, or, alternatively, the proteins produced may act as toxins under similar circumstances. It is known in the art that while plasmid vectors often exist as extrachromosomal circular DNA molecules, plasmid vectors may also be designed to be stably integrated into a host chromosome either randomly or in a targeted manner, and such integration may be accomplished using either a circular plasmid or a plasmid that has been linearized prior to introduction into the host cell.

[0140] “Plasmids” used in genetic engineering are called “plasmid vectors”. Many plasmids are commercially available for such uses. The gene to be replicated is inserted into copies of a plasmid containing genes that make cells resistant to particular antibiotics, and a multiple cloning site (MCS, or polylinker), which is a short region containing several commonly used restriction sites allowing the easy insertion of DNA fragments at this location. Another major use of plasmids is to make large amounts of proteins. In this case, researchers grow bacteria or eukaryotic cells containing a plasmid harboring the gene of interest, which can be induced to produce large amounts of proteins from the inserted gene.

[0141] In aspects where gene transfer is mediated by a DNA viral vector, such as an adenovirus (Ad) or adeno-associated virus (AAV), a vector construct refers to the polynucleotide comprising, consisting essentially of, or consisting of the viral genome or part thereof, and a transgene.

[0142] The term “adeno-associated virus” or “AAV” as used herein refers to a member of the class of viruses associated with this name and belonging to the genus Dependoparvovirus, family Parvoviridae. Adeno-associated virus is a single-stranded DNA virus that grows only in cells in which certain functions are provided by a co-infecting helper virus. General information and reviews of AAV can be found in, for example, Carter, 1989, Handbook of Parvoviruses, Vol. 1, pp. 169-228, and Berns, 1990, Virology, pp. 1743-1764, Raven Press, (New York). It is fully expected that the same principles described in these reviews will be applicable to additional AAV serotypes characterized after the publication dates of the reviews because it is well known that the various serotypes are quite closely related, both structurally and functionally, even at the genetic level. (See, for example, Blacklowe, 1988, pp. 165-174 of Parvoviruses and Human Disease, J. R. Pattison, ed.; and Rose, Comprehensive Virology 3:1-61 (1974)). For example, all AAV serotypes apparently exhibit very similar replication properties mediated by homologous rep genes; and all bear three related capsid proteins such as those expressed in AAV2. The degree of relatedness is further suggested by heteroduplex analysis which reveals extensive cross-hybridization between serotypes along the length of the genome; and the presence of analogous self-annealing segments at the termini that correspond to “inverted terminal repeat sequences” (ITRs). The similar infectivity patterns also suggest that the replication functions in each serotype are under similar regulatory control. Multiple serotypes of this virus are known to be suitable for gene delivery; all known serotypes can infect cells from various tissue types. At least 11 sequentially numbered AAV serotypes are known in the art. Non-limiting exemplary serotypes useful in the methods disclosed herein include any of the 11 serotypes, e.g., AAV2, AAV8, AAV9, or variant serotypes, e.g., AAV-DJ and AAV PHP.B. The AAV particle comprises, consists essentially of, or consists of three major viral proteins: VPl, VP2 and VP3. In embodiments, the AAV refers to the serotype AAV1, AAV2, AAV4, AAV5, AAV6, AAV7, AAV8, AAV9, AAV10, AAV11, AAV12, AAV13, AAVPHP.B, or AAVrh74.

[0143] An “AAV vector” as used herein refers to a vector comprising one or more heterologous nucleic acid (HNA) sequences and one or more AAV inverted terminal repeat sequences (ITRs). Such AAV vectors can be replicated when present in a host cell that provides the functionality of rep and cap gene products, and allow the ITRs and the nucleic acid between the ITRs to be packaged into infectious viral particles. In embodiments, AAV vectors comprise a promoter, at least one nucleic acid that may encode at least one protein or RNA, and/or an enhancer and/or a terminator within the flanking ITRs that is packaged into the infectious AAV particle. The ITRs and the nucleic acid between the ITRs can be encapsidated into the AAV capsid, and this encapsidated portion of the nucleic acid may be referred to as the “AAV vector genome”. AAV vectors may contain elements in addition to the encapsidated portion, for example, antibiotic resistance genes or other elements known in the art included in the plasmid for manufacturing purposes but not packaged into the AAV particle.

[0144] As used herein, the term “viral capsid” or “capsid” refers to the proteinaceous shell or coat of a viral particle. Capsids function to encapsidate, protect, transport, and release into the host cell a viral genome. Capsids are generally comprised of oligomeric structural subunits of protein (“capsid proteins”). As used herein, the term “encapsidated” means enclosed within a viral capsid. The viral capsid of AAV is composed of a mixture of three viral capsid proteins: VP1, VP2, and VP3. The mixture of VP1, VP2 and VP3 contains 60 monomers that are arranged in a T=1 icosahedral symmetry in a ratio of 1:1:10 (VP1:VP2:VP3) or 1:1:20 (VP1:VP2:VP3) as described in Sonntag F et al., (June 2010). “A viral assembly factor promotes AAV2 capsid formation in the nucleolus”. Proceedings of the National Academy of Sciences of the United States of America. 107 (22): 10220-5, and Rabinowitz J E, Samulski R J (December 2000). “Building a better vector: the manipulation of AAV virions”. Virology. 278 (2): 301-8, each of which is incorporated herein by reference in its entirety.

[0145] An “AAV virion” or “AAV viral particle” or “AAV viral vector” or “AAV vector particle” or “AAV particle” refers to a viral particle composed of at least one AAV capsid protein and an encapsidated AAV vector genome.

[0146] As used herein, the term “helper” in reference to a virus or plasmid refers to a virus or plasmid used to provide the additional components necessary for replication and packaging of any one of the AAV vector genomes disclosed herein. The components encoded by a helper virus may include any genes required for virion assembly, encapsidation, genome replication, and/or packaging. For example, the helper virus or plasmid may encode necessary enzymes for the replication of the viral genome. Non-limiting examples of helper viruses and plasmids suitable for use with AAV constructs include pHELP (plasmid), adenovirus (virus), or herpesvirus (virus). In embodiments, the pHELP plasmid may be the pHELPK plasmid, wherein the ampicillin expression cassette is exchanged with a kanamycin expression cassette; pHELPK has the sequence shown in SEQ ID NO: 92.

[0147] As used herein, a packaging cell (or a helper cell) is a cell used to produce viral vectors. Producing recombinant AAV viral vectors requires Rep and Cap proteins provided in trans as well as gene sequences from Adenovirus that help AAV replicate. In some aspects, packaging/helper cells contain a plasmid is stably incorporated into the genome of the cell. In other aspects, the packaging cell may be transiently transfected. Typically, a packaging cell is a eukaryotic cell, such as a mammalian cell or an insect cell.

[0148] As used herein, a reporter protein is a detectable protein that is operably linked to a promoter to assay the expression (for example, tissue specificity and/or strength) of the promoter. In aspects, a reporter protein may be operably linked to a polypeptide. In aspects, reporter proteins may be used in monitoring DNA delivery methods, functional identification and characterization of promoter and enhancer elements, translation and transcription regulation, mRNA processing and protein: protein interactions. Non-limiting examples of a reporter protein are β-galactosidase; a fluorescent protein, such as, Green Fluorescent Protein (GFP) or Red Fluorescent Protein (RFP); luciferase; glutathione S-transferase; and maltose binding protein.

[0149] A “pharmaceutical composition” is intended to include the combination of an active ingredient such as a polypeptide, a polynucleotide, an antibody, or a viral vector, with a carrier, inert or active such as a solid support, making the composition suitable for diagnostic or therapeutic use in vitro, in vivo or ex vivo.

[0150] As used herein, the term “pharmaceutically acceptable carrier” encompasses any of the standard pharmaceutical carriers, such as a phosphate buffered saline solution, water, and emulsions, such as an oil/water or water/oil emulsion, and various types of wetting agents. The compositions also can include stabilizers and preservatives. For examples of carriers, stabilizers and adjuvants, see Martin (1975) Remington's Pharm. Sci., 15th Ed. (Mack Publ. Co., Easton).

[0151] A “subject” of diagnosis or treatment is a cell or an animal such as a mammal, or a human. A subject is not limited to a specific species and includes non-human animals subject to diagnosis or treatment and those subject to infections or animal models, including, without limitation, simian, murine, rat, canine, or leporid species, as well as other livestock, sport animals, or pets. In embodiments, the subject is a human.

[0152] The term “tissue” is used herein to refer to tissue of a living or deceased organism or any tissue derived from or designed to mimic a living or deceased organism. The tissue may be healthy, diseased, and/or have genetic mutations. The biological tissue may include any single tissue (e.g., a collection of cells that may be interconnected), or a group of tissues making up an organ or part or region of the body of an organism. The tissue may comprise, consist essentially of, or consist of a homogeneous cellular material or it may be a composite structure such as that found in regions of the body including the thorax which for instance can include lung tissue, skeletal tissue, and/or muscle tissue. Exemplary tissues include, but are not limited to those derived from liver, lung, thyroid, skin, pancreas, blood vessels, bladder, kidneys, brain, biliary tree, duodenum, abdominal aorta, iliac vein, heart and intestines, including any combination thereof.

[0153] As used herein, “treating” or “treatment” of a disease in a subject refers to (1) preventing the symptoms or disease from occurring in a subject that is predisposed or does not yet display symptoms of the disease; (2) inhibiting the disease or arresting its development; or (3) ameliorating or causing regression of the disease or the symptoms of the disease. As understood in the art, “treatment” is an approach for obtaining beneficial or desired results, including clinical results. For the purposes of the present technology, beneficial or desired results can include one or more, but are not limited to, alleviation or amelioration of one or more symptoms, diminishment of extent of a condition (including a disease), stabilized (i.e., not worsening) state of a condition (including disease), delay or slowing of condition (including disease), progression, amelioration or palliation of the condition (including disease), states and remission (whether partial or total), whether detectable or undetectable.

[0154] As used herein the term “effective amount” intends to mean a quantity sufficient to achieve a desired effect. In the context of therapeutic or prophylactic applications, the effective amount will depend on the type and severity of the condition at issue and the characteristics of the individual subject, such as general health, age, sex, body weight, and tolerance to pharmaceutical compositions. In the context of gene therapy, in embodiments the effective amount is the amount sufficient to result in regaining part or full function of a gene that is deficient in a subject. In embodiments, the effective amount of an AAV viral particle is the amount sufficient to result in expression of a gene in a subject. The skilled artisan will be able to determine appropriate amounts depending on these and other factors.

[0155] In embodiments, the effective amount will depend on the size and nature of the application in question. It will also depend on the nature and sensitivity of the target subject and the methods in use. The skilled artisan will be able to determine the effective amount based on these and other considerations. The effective amount may comprise, consist essentially of, or consist of one or more administrations of a composition depending on the embodiment.

[0156] As used herein, the term “administer” or “administration” intends to mean delivery of a substance to a subject such as an animal or human. Administration can be effected in one dose, continuously or intermittently throughout the course of treatment. Methods of determining the most effective means and dosage of administration will vary with the composition used for therapy, the purpose of the therapy, as well as the age, health or gender of the subject being treated. Single or multiple administrations can be carried out with the dose level and pattern being selected by the treating physician or in the case of pets and other animals, treating veterinarian.

### AAV Structure and Function

[0157] AAV is a replication-deficient parvovirus, the single-stranded DNA genome of which is about 4.7 kb in length, including two about 145-nucleotide inverted terminal repeat (ITRs). There are multiple serotypes of AAV. The nucleotide sequences of the genomes of the AAV serotypes are known. For example, the complete genome of AAV-1 is provided in GenBank Accession No. NC_002077; the complete genome of AAV-2 is provided in GenBank Accession No. NC_001401 and Srivastava et al., J. Virol., 45:555-564 (1983); the complete genome of AAV-3 is provided in GenBank Accession No. NC_1829; the complete genome of AAV-4 is provided in GenBank Accession No. NC_001829; the AAV-5 genome is provided in GenBank Accession No. AF085716; the complete genome of AAV-6 is provided in GenBank Accession No. NC_001862; at least portions of AAV-7 and AAV-8 genomes are provided in GenBank Accession Nos. AX753246 and AX753249, respectively; the AAV-9 genome is provided in Gao et al., J. Virol., 78:6381-6388 (2004); the AAV-10 genome is provided in Mol. Ther., 13 (1): 67-76 (2006); and the AAV-11 genome is provided in Virology, 330 (2): 375-383 (2004). The sequence of the AAV rh.74 genome is provided in U.S. Pat. No. 9,434,928, incorporated herein by reference in its entirety. U.S. Pat. No. 9,434,928 also provide the sequences of the capsid proteins and a self-complementary genome. In one aspect, the genome is a self-complementary genome. Cis-acting sequences directing viral DNA replication (rep), encapsidation/packaging and host cell chromosome integration are contained within the AAV ITRs. Three AAV promoters (named p5, p19, and p40 for their relative map locations) drive the expression of the two AAV internal open reading frames encoding rep and cap genes. The two rep promoters (p5 and p19), coupled with the differential splicing of the single AAV intron (at nucleotides 2107 and 2227), result in the production of four rep proteins (rep 78, rep 68, rep 52, and rep 40) from the rep gene. Rep proteins possess multiple enzymatic properties that are ultimately responsible for replicating the viral genome.

[0158] The cap gene is expressed from the p40 promoter and encodes the three capsid proteins, VP1, VP2, and VP3. Alternative splicing and non-consensus translational start sites are responsible for the production of the three related capsid proteins. More specifically, after the single mRNA from which each of the VP1, VP2 and VP3 proteins are translated is transcribed, it can be spliced in two different manners: either a longer or shorter intron can be excised, resulting in the formation of two pools of mRNAs: a 2.3 kb- and a 2.6 kb-long mRNA pool. The longer intron is often preferred and thus the 2.3-kb-long mRNA can be called the major splice variant. This form lacks the first AUG codon, from which the synthesis of VP1 protein starts, resulting in a reduced overall level of VP1 protein synthesis. The first AUG codon that remains in the major splice variant is the initiation codon for the VP3 protein. However, upstream of that codon in the same open reading frame lies an ACG sequence (encoding threonine) which is surrounded by an optimal Kozak (translation initiation) context. This contributes to a low level of synthesis of the VP2 protein, which is actually the VP3 protein with additional N terminal residues, as is VP1, as described in Becerra S P et al., (December 1985). “Direct mapping of adeno-associated virus capsid proteins B and C: a possible ACG initiation codon”. Proceedings of the National Academy of Sciences of the United States of America. 82 (23): 7919-23, Cassinotti P et al., (November 1988). “Organization of the adeno-associated virus (AAV) capsid gene: mapping of a minor spliced mRNA coding for virus capsid protein 1”. Virology. 167 (1): 176-84, Muralidhar S et al., (January 1994). “Site-directed mutagenesis of adeno-associated virus type 2 structural protein initiation codons: effects on regulation of synthesis and biological activity”. Journal of Virology. 68 (1): 170-6, and Trempe J P, Carter B J (September 1988). “Alternate mRNA splicing is required for synthesis of adeno-associated virus VP1 capsid protein”. Journal of Virology. 62 (9): 3356-63, each of which is herein incorporated by reference. A single consensus polyadenylation signal is located at map position 95 of the AAV genome. The life cycle and genetics of AAV are reviewed in Muzyczka, Current Topics in Microbiology and Immunology, 158:97-129 (1992).

[0159] Each VP1 protein contains a VP1 portion, a VP2 portion and a VP3 portion. The VP1 portion is the N-terminal portion of the VP1 protein that is unique to the VP1 protein, corresponding to the amino acids 1-137 portion of SEQ ID NO: 164. The VP2 portion is the amino acid sequence present within the VP1 protein that is also found in the N-terminal portion of the VP2 protein, corresponding to the amino acids 138-202 portion of SEQ ID NO: 164. The VP3 portion and the VP3 protein have the same sequence. The VP3 portion is the C-terminal portion of the VP1 protein that is shared with the VP1 and VP2 proteins, corresponding to the amino acids 203-737 portion of SEQ ID NO: 164. See FIG. 5.

[0160] The VP3 protein can be further divided into discrete variable surface regions I-IX (VR-I-IX). Each of the variable surface regions (VRs) can comprise or contain specific amino acid sequences that either alone or in combination with the specific amino acid sequences of each of the other VRs can confer unique infection phenotypes (e.g., decreased antigenicity, improved transduction and/or tissue-specific tropism relative to other AAV serotypes) to a particular serotype as described in DiMatta et al., “Structural Insight into the Unique Properties of Adeno-Associated Virus Serotype 9” J. Virol., Vol. 86 (12): 6947-6958 June 2012, the contents of which are incorporated herein by reference.

[0161] AAV possesses unique features that make it attractive as a viral vector for delivering foreign DNA to cells, for example, in gene therapy. AAV infection of cells in culture is noncytopathic, and natural infection of humans and other animals is silent and asymptomatic. Moreover, AAV infects many mammalian cells allowing the possibility of targeting many different tissues in vivo. Moreover, AAV transduces slowly dividing and non-dividing cells, and can persist essentially for the lifetime of those cells as a transcriptionally active nuclear episome (extrachromosomal element). The AAV proviral genome is inserted as cloned DNA in plasmids, which makes construction of recombinant genomes feasible. Furthermore, because the signals directing AAV replication and genome encapsidation are contained within the ITRs of the AAV genome, some or all of the internal approximately 4.3 kb of the genome (encoding replication and structural capsid proteins, rep-cap) may be replaced with foreign DNA to generate AAV vector genomes. The rep and cap proteins may be provided in trans. Another significant feature of AAV is that it is an extremely stable and hearty virus. It easily withstands the conditions used to inactivate adenovirus (56° to 65° C. for several hours), making cold preservation of AAV less critical. AAV may even be lyophilized. Finally, AAV-infected cells are not resistant to superinfection.

[0162] Multiple studies have demonstrated long-term (>1.5 years) recombinant AAV-mediated protein expression in muscle. See, Clark et al., Hum Gene Ther, 8:659-669 (1997); Kessler et al., Proc Nat. Acad Sc. USA, 93:14082-14087 (1996); and Xiao et al., J Virol, 70:8098-8108 (1996). See also, Chao et al., Mol Ther, 2:619-623 (2000) and Chao et al., Mol Ther, 4:217-222 (2001). Moreover, because muscle is highly vascularized, recombinant AAV transduction has resulted in the appearance of transgene products in the systemic circulation following intramuscular injection as described in Herzog et al., Proc Natl Acad Sci USA, 94:5804-5809 (1997) and Murphy et al., Proc Natl Acad Sci USA, 94:13921-13926 (1997). Moreover, Lewis et al., J Virol, 76:8769-8775 (2002) demonstrated that skeletal myofibers possess the necessary cellular factors for correct antibody glycosylation, folding, and secretion, indicating that muscle is capable of stable expression of secreted protein therapeutics. Recombinant AAV (rAAV) genomes of the invention comprise, consist essentially of, or consist of a nucleic acid molecule encoding a therapeutic protein (e.g., CYP4V2, RS1, PDE6B, ABCA4, BEST1, OPA1 or OPA3) and one or more AAV ITRs flanking the nucleic acid molecule. AAV DNA in the rAAV genomes may be from any AAV serotype for which a recombinant virus can be derived including, but not limited to, AAV serotypes AAV-1, AAV-2, AAV-3, AAV-4, AAV-5, AAV-6, AAV-7, AAV-8, AAV-9, AAV-10, AAV-11, AAV-12, AAV-13, AAV PHP.B and AAV rh74. Production of pseudotyped rAA Vis disclosed in, for example, WO2001083692. Other types of rAAV variants, for example rAAV with capsid mutations, are also contemplated. See, e.g., Marsic et al., Molecular Therapy, 22 (11): 1900-1909 (2014). The nucleotide sequences of the genomes of various AAV serotypes are known in the art.

### AAV Vector Particles, Capsid Proteins, and AAV Vectors

[0163] Provided herein are AAV vector particles, AAV vectors, and capsid proteins that have desirable tissue specificity and find use in delivering a variety of therapeutic payloads, including nucleic acids, and proteins useful in the treatment of disease.

### AAV Capsid Proteins

[0164] The disclosure provides AAV particles possessing properties of high gene transfer efficiency and increased tissue tropism. AAV viral vector delivery currently relies on the use of serotype selection for tissue targeting based on the natural tropism of the virus or by the direct injection into target tissues. Many currently available AAV viral vectors are, however, suboptimal for delivering genes to a specific target site.

[0165] The present disclosure provides AAV capsid protein sequences that confer high gene transfer efficiency and increased tissue specificity on the AAV particles comprising them. In embodiments, the AAV particles comprising such AAV capsid proteins are administered via a specific delivery route to achieve optimal delivery to specific target site.

[0166] In embodiments, the VP1 capsid protein comprises any one of the amino acid sequences listed in Table 1, or a sequence having up to 1, 2, 3, 4, 5, 6, 7, 8, 9, or 10 amino acids mutated, deleted or added as compared to, any one of the amino acid sequences listed in Table 1. In embodiments, up to 15 amino acids, up to 20 amino acids, up to 30 amino acids, or up to 40 amino acids may be mutated, deleted or added compared to these sequences. In embodiments, the VP1 capsid protein is encoded by any one of the nucleic acid sequences listed in Table 1, or a sequence having up to 5, up to 10, up to 30, or up to 60 nucleotide changes to any one of the nucleic acid sequences listed in Table 1.

TABLE 1
VP1 Capsid Proteins

| Amino Acid SEQ ID NO: | NA SEQ ID NO: | AAV Capsid Name |
|---|---|---|
| 1 | 98 | AAV 110 |
| 2 | 15 | AAV 204 |
| 3 | 18 | AAV 214 |
| 30 | 19 | AAV 214A |
| 31 | 20 | AAV 214e |
| 32 | 21 | AAV 214e8 |
| 33 | 22 | AAV 214e9 |
| 34 | 23 | AAV 214e10 |
| 49 | 47 | AAV ITB102_45 |
| 84 | 82 | AAV 214AB |
| 164 | 167 | AAV 214-D5 |

[0167] In embodiments, the AAV VP1 protein comprises, consists essentially of, or consists of an amino acid sequence of SEQ ID NOs: 1-3, 30-34, 49, 84 or 164, or a sequence having up to 1, 2, 3, 4, 5, 6, 7, 8, 9, or 10 amino acids different from SEQ ID NOs: 1-3, 30-34, 49, 84 or 164. Also provided are polynucleotides encoding these VP1 proteins. In embodiments, the polynucleotides encoding the VP1 proteins comprise, consist essentially of, or consist of the sequence of SEQ ID NOs: 15, 18-23, 47, 82, 98 or 167 or a sequence having up to 5, up to 10, or up to 30 nucleotide changes to SEQ ID NOs: 15, 18-23, 47, 82, 98 or 167.

[0168] In embodiments, the AAV capsid sequence is an AAV-110 capsid protein (SEQ ID NO: 1), AAV204 capsid protein (SEQ ID NO: 2), AAV214 capsid protein (SEQ ID NO: 3) or AAV ITB102_45 capsid protein (SEQ ID NO: 49). In embodiments, the AAV capsid protein is a variant of the AAV214 capsid protein. In embodiments, the AAV capsid protein is AAV214A (SEQ ID NO: 30), AAV-214-AB (SEQ ID NO: 84), AAV214e (SEQ ID NO: 31), AAV214e8 (SEQ ID NO: 32), AAV214e9 (SEQ ID NO: 33), AAV214e10 (SEQ ID NO: 34), or AAV214-D5 (SEQ ID NO: 164). In embodiments, the AAV capsid protein is AAV214-D5 (SEQ ID NO: 164).

[0169] In embodiments, the AAV capsid sequence is an AAV204 capsid protein (SEQ ID NO: 2), AAV214 capsid protein (SEQ ID NO: 3), AAV214-D5 capsid protein (SEQ ID NO: 164) or AAV8 capsid protein (SEQ ID NO: 67).

[0170] Sequences for exemplary VP2 and VP3 proteins are provided in Table 2 and Table 3. Given the VP2 and VP3 sequences, the VP1 portions may be determined by alignment with the full, VP1 protein sequence.

TABLE 2
VP2 Capsid Proteins

| Amino Acid SEQ ID NO: | Name |
|---|---|
| 35 | 214 |
| 36 | 214A |
| 37 | 214e |
| 38 | 214e8 |
| 39 | 214e9 |
| 40 | 214e10 |
| 85 | 214AB |
| 50 | ITB102_45 |
| 165 | 214-D5 |

[0171] In embodiments, the AAV VP2 proteins comprise, consist essentially of, or consist of an amino acid sequence of any one of SEQ ID NOs: 35-40, 50, 85 and 165, or a sequence having up to 1, 2, 3, 4, 5, 6, 7, 8, 9, or 10 amino acids different from SEQ ID NOs: 35-40, 50, 85 or 165. In embodiments, the AAV VP2 proteins comprise, consist essentially of, or consist of an amino acid sequence of SEQ ID NO: 165, or a sequence having up to 1, 2, 3, 4, 5, 6, 7, 8, 9, or 10 amino acids different from SEQ ID NO: 165.

[0172] Also provided are polynucleotides encoding these VP2 proteins. In embodiments, the polynucleotide encoding the VP2 protein comprises, consists essentially of, or consists of the sequence of SEQ ID NO: 47, or a sequence having up to 5, up to 10, or up to 30 nucleotide changes to SEQ ID NO: 47. In embodiments, the polynucleotide encoding the VP2 protein comprises, consists essentially of, or consists of the sequence of SEQ ID NO: 168, or a sequence having up to 5, up to 10, or up to 30 nucleotide changes to SEQ ID NO: 168.

[0173] Exemplary nucleic acids for the other capsid VP2 portions may be derived from the corresponding portions of the VP1 capsid protein nucleic acids.

TABLE 3
VP3 Capsid proteins

| Amino Acid SEQ ID NO: | NA SEQ ID NO: | AAV Capsid Name |
|---|---|---|
| 17 | 16 | 204 |
| 41 | 24 | 214 |
| 42 | 25 | 214A |
| 43 | 26 | 214e |
| 44 | 27 | 214e8 |
| 45 | 28 | 214e9 |
| 46 | 29 | 214e10 |
| 86 | 83 | 214AB |
| 51 | 48 | ITB102_45 |
| 166 | 169 | 214-D5 |

[0174] The VP3 proteins of AAV214, AAV214e, AAV214e8, AAV214e9, AAV214e10 have the same amino acid (SEQ ID NO:41) and nucleic acid (SEQ ID NO: 24) sequences.

[0175] In embodiments, the AAV VP3 proteins comprise, consist essentially of, or consist of the amino acid sequence of SEQ ID NOs: 17, 41-46, 51, 86, or 166, or a sequence having up to 1, 2, 3, 4, 5, 6, 7, 8, 9, or 10 amino acids different from SEQ ID NOs: 17, 41-46, 51, 86, or 166. In embodiments, the AAV VP3 proteins comprise, consist essentially of, or consist of the amino acid sequence of SEQ ID NO: 166, or a sequence having up to 1, 2, 3, 4, 5, 6, 7, 8, 9, or 10 amino acids different from SEQ ID NO: 166.

[0176] Also provided are polynucleotides encoding these VP3 proteins. In embodiments, the polynucleotides encoding the proteins that comprise, consist essentially of, or consist of the sequence of SEQ ID NOs: 16, 24-29, 48, 83 or 169, or a sequence having up to 5, up to 10, or up to 30 nucleotide changes to SEQ ID NOs: 16, 24-29, 48, 83, or 169. In embodiments, the polynucleotides encoding the proteins that comprise, consist essentially of, or consist of the sequence of SEQ ID NO: 169, or a sequence having up to 5, up to 10, or up to 30 nucleotide changes to SEQ ID NO: 169.

[0177] In embodiments, the AAV capsid protein is a chimeric protein. In embodiments, a VP1, VP2, or VP3 portion of the AAV capsid protein disclosed herein may be replaced with a VP1, VP2, or VP3 portion from a different AAV capsid protein disclosed herein.

[0178] In embodiments, provided herein is an AAV capsid protein comprising a leucine residue at amino acid 129, an asparagine residue at amino acid 586 and a glutamic acid residue at amino acid 723, wherein amino acid positions in the AAV capsid protein are numbered with respect to amino acid positions in the amino acid sequence of SEQ ID NO: 2. In some cases, the protein comprises the amino acid sequence of SEQ ID NO: 2. In other cases, these amino acids may be introduced into other capsid proteins.

[0179] In embodiments, provided herein is an AAV VP1 capsid protein comprising a VP1 portion, a VP2 portion and a VP3 portion, wherein the VP1 portion comprises a leucine (L) residue at amino acid 129, wherein the VP2 portion comprises a threonine (T) or asparagine (N) residue at amino acid 157 and a lysine (K) or serine(S) residue at amino acid 162, and wherein the VP3 portion comprises asparagine (N) residue at amino acid 223, an alanine (A) residue at amino acid 224, a histidine (H) residue at amino acid 272, a threonine (T) residue at amino acid 410, a histidine (H) residue at amino acid 724 and a proline (P) residue at amino acid 734, wherein amino acid positions in the AAV capsid protein are numbered with respect to amino acid positions in the amino acid sequence of SEQ ID NO: 3 (i.e., VP1 capsid subunit numbering).

[0180] In embodiments, the VP1 portion further comprises an aspartic acid (D) or alanine (A) residue at amino acid 24, wherein amino acid positions in the AAV capsid protein are numbered with respect to amino acid positions in the amino acid sequence of SEQ ID NO: 3. In embodiments, the VP2 portion further comprises one or more of (i) a proline (P) residue at amino acid 148; (ii) an arginine (R) residue inserted at amino acid 152; (iii) an arginine (R) residue at amino acid 168; (iv) an isoleucine (I) residue at amino acid 189; and (v) a serine(S) residue at amino acid 200, wherein amino acid positions in the AAV capsid protein are numbered with respect to amino acid positions in the amino acid sequence of SEQ ID NO: 3.

[0181] In embodiments, one or more variable regions I through IX (see FIG. 5) in the disclosed VP3 portion capsid proteins may be removed and replaced with alternative regions. Suitable alternatives are identified in Table 6 below. The location for these, as well as the identity of additional alternatives may be identified by alignment to SEQ ID NO:41 as shown in FIG. 5. In embodiments, one or more VRs may have an insertion of 1, 2 or 3 amino acids. In embodiments, one or more VRs may have a deletion of 1, 2 or 3 amino acids.

TABLE 6
Variable Regions

| VR | Sequence |
|---|---|
| I | SASTGAS (SEQ ID NO. 52); NSTSGGSS (SEQ |
| | ID NO. 53); SSTSGGSS (SEQ ID NO: 87); |
| | NGTSGGST (SEQ ID NO: 170) |
| II | DNNGVK (SEQ ID NO. 54) |
| III | NDGS (SEQ ID NO. 55) |
| IV | INGSGQNQQT (SEQ ID NO. 56); QSTGGTAGTQQ |
| | (SEQ ID NO: 171) |
| V | RVSTTTGQNNNSNFAWTA (SEQ ID NO. 57) |
| VI | HKEGEDRFFPLSG (SEQ ID NO. 58) |
| VII | KQNAARDNADYSDV (SEQ ID NO: 59) |
| VIII | ADNLQQQNTAPQI (SEQ ID NO. 60) |
| IX | NYYKSTSVDF (SEQ ID NO. 61). |

[0182] The disclosure provides nucleic acids encoding any one of the AAV capsid proteins disclosed herein. The disclosure also provides vectors comprising any one of the nucleic acids disclosed herein.

[0183] In embodiments, AAV is an AAV9 serotype. Alternative serotypes or modified capsid viruses can be used to optimize neuronal tropism. Alternative vectors include: a modified AAV9 serotype vector for higher neuronal tropism than standard AAV9, e.g., PHP.B that uses a Cre-lox recombination system to identify neuronally targeted vectors. Alternatively, the AAV9 PHP.B has a modified amino acid 498 of VP1 from asparagine to lysine to reduce the liver tropism. Further variants of AAVrh74 that have mutated several amino acids can be used for very broad tissue tropism including the brain.

### AAV Vectors

[0184] The AAV vectors supply the nucleic acid that becomes encapsidated into the AAV vector particle including element(s) involved in controlling expression of the nucleic acids in the subject, as well as the ITRs to facilitate encapsidation. In embodiments, the AAV vectors disclosed herein comprise at least one heterologous nucleic acid (HNA) sequence, which, when expressed in a cell of a subject, is effective to treat a disease or disorder. In embodiments, the HNA sequence comprises a transgene. In embodiments, the AAV vectors comprise at least one ITR sequence and at least one transgene. In embodiments, the transgene encodes a therapeutic protein or a therapeutic RNA.

[0185] In embodiments, control of transgene expression in the host cell may be regulated by regulatory elements contained within the AAV vector, including promoter sequences, and polyadenylation signals. In embodiments, the AAV vector may also encode a signal peptide. In embodiments, the AAV vectors have 5′ and 3′ inverted terminal repeats (ITRs). The 5′ ITR is located upstream of a promoter, which in turn is upstream of the transgene. In embodiments, the 5′ and 3′ ITR have the same sequence. In embodiments, they have a different sequence. In embodiments, an AAV vector of the disclosure may comprise, in 5′ to 3′ orientation, a first (5′) ITR, a promoter, a transgene, a polyadenylation signal, and a second (3′) ITR.

[0186] In embodiments, the 5′ ITR comprises, consists essentially of, or consists of a nucleic acid sequence having at least 90%, at least 95%, at least 97%, at least 98%, at least 99%, or 100% identity to SEQ ID NO: 253. In embodiments, the 3′ ITR comprises, consists essentially of, or consists of a nucleic acid sequence having at least 90%, at least 95%, at least 97%, at least 98%, at least 99%, or 100% identity to SEQ ID NO: 254. In embodiments, the corresponding AAV vector is for expression of Opa1 transgene.

[0187] In embodiments, the 5′ ITR comprises, consists essentially of, or consists of a nucleic acid sequence having at least 90%, at least 95%, at least 97%, at least 98%, at least 99%, or 100% identity to SEQ ID NO: 255. In embodiments, the 3′ ITR comprises, consists essentially of, or consists of a nucleic acid sequence having at least 90%, at least 95%, at least 97%, at least 98%, at least 99%, or 100% identity to SEQ ID NO: 256. In embodiments, the corresponding AAV vector is for expression of RS1 transgene.

[0188] Further descriptions of ITRs can be found, for example, in McCarty et al., Gene Ther. 2003 December; 10 (26): 2112-8, the content of which is incorporated herein in its entirety.

[0189] In embodiments, the HNA (for example, an HNA comprising a transgene) is operably linked to a promoter.

[0190] In embodiments, the HNA is operably linked to a constitutive promoter. The constitutive promoter can be any constitutive promoter known in the art and/or provided herein. In embodiments, the constitutive promoter comprises, consists essentially of, or consists of a Rous sarcoma virus (RSV) LTR promoter (optionally with the RSV enhancer), a cytomegalovirus (CMV) promoter, an SV40 promoter, a dihydrofolate reductase promoter, a beta-actin promoter, a phosphoglycerol kinase (PGK) promoter, a U6 promoter, an H1 promoter, a hybrid chicken beta actin promoter, a MeCP2 promotor, an H1 promoter, a U1a promoter, a mMeP418 promoter, a mMeP426 promoter, a minimal MeCP2 promoter, a CAG promoter, or an EF1 promoter. It is known in the art that the nucleotide sequences of such promoters may be modified in order to increase or decrease the efficiency of mRNA transcription. See, e.g., Gao et al. (2018) Mol. Ther.: Nucleic Acids 12:135-145 (modifying TATA box of 7SK, U6 and H1 promoters to abolish RNA polymerase III transcription and stimulate RNA polymerase II-dependent mRNA transcription). In embodiments, the HNA sequence is operably linked to a tissue-specific control promoter, or an inducible promoter. In embodiments, the tissue-specific control promoter is a central nervous system (CNS) cell-specific promoter, a lung-specific promoter, a skin-specific promoter, a muscle-specific promoter, a liver-specific promoter, an eye-specific promoter (e.g., a VMD2, or mRho promoter).

[0191] In embodiments, the promoter may comprise, consist essentially of or consist of a polynucleotide having the sequence of SEQ ID NO: 96 (mouse U1 promoter) or a SEQ ID NO: 97 (a H1 promoter). In embodiments, the promoter is an U1a or U1b promoter, EF1 promoter, or CBA (chicken beta-actin). In embodiments, the promoter may comprise, consist essentially of or consist of any one of the nucleic acid sequences listed in Table 5, or a sequence having up to 5, up to 10, up to 20, or up to 30 nucleotide changes to any one of the nucleic acid sequences listed in Table 5. In embodiments, the promoter may comprise, consist essentially of, or consist of a nucleic acid sequence having at least 90%, at least 95%, at least 97%, at least 98%, at least 99%, or 100% identity to any one of the nucleic acid sequences listed in Table 5.

[0192] In embodiments, the promoter is a Chicken beta-Actin hybrid (CBh) promoter. In embodiments, the CBh promoter comprises, consists essentially of, or consists of a nucleic acid sequence having at least 90%, at least 95%, at least 97%, at least 98%, at least 99%, or 100% identity to SEQ ID NO: 154.

[0193] In embodiments, the promoter is a Rhodopsin Kinase (RK) promoter. In embodiments, the RK promoter comprises, consists essentially of, or consists of a nucleic acid sequence having at least 90%, at least 95%, at least 97%, at least 98%, at least 99%, or 100% identity to SEQ ID NO: 196.

[0194] In embodiments, the promoter is a Rho promoter. In embodiments, the Rho promoter comprises, consists essentially of, or consists of a nucleic acid sequence having at least 90%, at least 95%, at least 97%, at least 98%, at least 99%, or 100% identity to SEQ ID NO: 197.

[0195] In embodiments, the promoter is a PDE promoter. In embodiments, the PDE promoter comprises, consists essentially of, or consists of a nucleic acid sequence having at least 90%, at least 95%, at least 97%, at least 98%, at least 99%, or 100% identity to SEQ ID NO: 198.

TABLE 5
Non-limiting Examples of Promoters

| | Nucleic acid |
|---|---|
| Promoter name | SEQ ID No. |
| Mouse U1a promoter | 152 |
| Polymerase III H1 mutant promoter | 153 |
| Chicken β-actin hybrid promoter CBh (CBh promoter | 154 |
| consists of CMV enhancer, CBA promoter, and first CBA | |
| exon) | |
| MeCP2 min promoter sequence | 155 |
| MeCP2 promoter sequence | 156 |
| MeCP418 promoter sequence | 157 |
| MeCP426 promoter sequence | 158 |
| VMD2 promoter | 159 |
| PDE6b promoter | 160 |
| mRho promoter | 161 |
| CMV promoter | 162 |
| UbC promoter | 163 |
| RK promoter | 196 |
| Rho promoter | 197 |
| PDE promoter | 198 |

[0196] In embodiments, the AAV vector comprises an enhancer. In embodiments, the enhancer is operably linked to the HNA sequence. In embodiments, the enhancer is located upstream of the promoter. In embodiments, the enhancer is located immediately upstream of the promoter, without any additional nucleotide in between.

[0197] In embodiments, the enhancer is an interphotoreceptor retinoid-binding protein (IRBP) enhancer. In embodiments, the IRBP enhancer comprises, consists essentially of, or consists of a nucleic acid sequence having at least 90%, at least 95%, at least 97%, at least 98%, at least 99%, or 100% identity to SEQ ID NO: 199.

[0198] In embodiments, the HNA sequence is operably linked to an additional regulatory element. The additional regulatory element can be a woodchuck hepatitis virus post-transcriptional regulatory element (“WPRE”). In embodiments, the AAV vector may comprise regulatory components suitable for growth and culture of the vector in a bacterial host for vector production purposes. For example, the vector may comprise genes for antibiotic resistance, and maintenance of the plasmid in bacteria, as well as associated regulatory elements to control protein expression in bacteria.

[0199] In embodiments, the HNA sequence is operably linked to a polyadenylation signal. In embodiments, the polyadenylation signal comprises, consists essentially of or consists of an MeCP2 polyadenylation signal, a retinol dehydrogenase 1 (RDH1) polyadenylation signal, a bovine growth hormone (BGH) polyadenylation signal, an SV40 polyadenylation signal, a SPA49 polyadenylation signal, a sNRP-TK65 polyadenylation signal, a sNRP polyadenylation signal, or a TK65 polyadenylation signal. An exemplary SPA49 polyadenylation signal is described in Ostedgaard et al., Proc. Nat'l Acad. Sci. USA (Feb. 22, 2005) 102:2952-2957, incorporated herein by reference. In embodiments, the polyadenylation signal sequence comprises, consists essentially of, or consists of a nucleic acid sequence having at least 90%, at least 95%, at least 97%, at least 98%, at least 99%, or 100% identity to SEQ ID NO: 201. In embodiments, the polyadenylation signal sequence comprises, consists essentially of, or consists of a nucleic acid sequence having at least 90%, at least 95%, at least 97%, at least 98%, at least 99%, or 100% identity to SEQ ID NO: 225.

[0200] In embodiments, an intron is inserted between the promoter and the HNA. In embodiments, the intron comprises, consists essentially of, or consists of a nucleic acid sequence having at least 90%, at least 95%, at least 97%, at least 98%, at least 99%, or 100% identity to SEQ ID NO: 200. In embodiments, the intron comprises, consists essentially of, or consists of a nucleic acid sequence having at least 90%, at least 95%, at least 97%, at least 98%, at least 99%, or 100% identity to SEQ ID NO: 222. In embodiments, the intron comprises, consists essentially of, or consists of a nucleic acid sequence having at least 90%, at least 95%, at least 97%, at least 98%, at least 99%, or 100% identity to SEQ ID NO: 227. In embodiments, the AAV vector genome comprises a CBA sequence located immediately upstream of the intron sequence without any additional nucleotides in between, and wherein the CBA sequence comprises, consists essentially of, or consists of the nucleic acid sequence SEQ ID NO: 229, or a sequence having at most 10, at most 9, at most 8, at most 7, at most 6, at most 5, at most 4, at most 3, at most 2, or at most 1 mutation(s) thereto. In embodiments, the intron comprises, consists essentially of, or consists of a nucleic acid sequence having at least 90%, at least 95%, at least 97%, at least 98%, at least 99%, or 100% identity to SEQ ID NO: 226. In embodiments, the intron does not comprise polynucleotide sequence “ATG”.

[0201] In embodiments, a first telomeric repeat is inserted between the polyadenylation signal and the 3′ ITR. In embodiments, the telomeric repeat comprises a repeat unit of CCCTAA (SEQ ID NO: 217). In embodiments, the telomeric repeat comprises an intermediate repeat comprising 1, 2, 3, 4, 5, 6, 7, 8, 9, 10, or more, consecutive copies of the repeat unit of CCCTAA (SEQ ID NO: 217). In embodiments, the telomeric repeat comprises 1, 2, 3, 4, 5, 6, 7, 8, 9, 10, or more, copies of the intermediate repeat. In embodiments, the copies of the intermediate repeat is separated by a spacer comprising TTTTT (SEQ ID NO: 218). In embodiments, the first telomeric repeat comprises, consists essentially of, or consists of a nucleic acid sequence having at least 90%, at least 95%, at least 97%, at least 98%, at least 99%, or 100% identity to SEQ ID NO: 202.

[0202] In embodiments, a first telomeric repeat is inserted between the polyadenylation signal and the 3′ ITR. In embodiments, the telomeric repeat comprises a repeat unit of TTAGGG (SEQ ID NO: 219). In embodiments, the telomeric repeat comprises an intermediate repeat comprising 1, 2, 3, 4, 5, 6, 7, 8, 9, 10, or more, consecutive copies of the repeat unit of TTAGGG (SEQ ID NO: 219). In embodiments, the telomeric repeat comprises 1, 2, 3, 4, 5, 6, 7, 8, 9, 10, or more, copies of the intermediate repeat. In embodiments, the copies of the intermediate repeat is separated by a spacer comprising AAAAA (SEQ ID NO: 220). In embodiments, the first telomeric repeat comprises, consists essentially of, or consists of a nucleic acid sequence having at least 90%, at least 95%, at least 97%, at least 98%, at least 99%, or 100% identity to SEQ ID NO: 203.

[0203] In embodiments, a second telomeric repeat is inserted between the 5′ ITR and the promoter. In embodiments, the telomeric repeat comprises a repeat unit of TTAGGG (SEQ ID NO: 219). In embodiments, the telomeric repeat comprises an intermediate repeat comprising 1, 2, 3, 4, 5, 6, 7, 8, 9, 10, or more, consecutive copies of the repeat unit of TTAGGG (SEQ ID NO: 219). In embodiments, the telomeric repeat comprises 1, 2, 3, 4, 5, 6, 7, 8, 9, 10, or more, copies of the intermediate repeat. In embodiments, the copies of the intermediate repeat is separated by a spacer comprising AAAAA (SEQ ID NO: 220). In embodiments, the second telomeric repeat comprises, consists essentially of, or consists of a nucleic acid sequence having at least 90%, at least 95%, at least 97%, at least 98%, at least 99%, or 100% identity to SEQ ID NO: 203.

[0204] In embodiments, a human beta-globin scaffold/matrix attachment region (βGlo_s/MAR) sequence is inserted between the polyadenylation signal and the downstream telomeric repeat, or is inserted between the polyadenylation signal and the downstream 3′ ITR. In embodiments, the βGlo_s/MAR sequence comprises, consists essentially of, or consists of a nucleic acid sequence having at least 90%, at least 95%, at least 97%, at least 98%, at least 99%, or 100% identity to SEQ ID NO: 221.

### Heterologous Nucleic Acids (HNA)

[0205] The AAV viral vectors disclosed herein infect and deliver one or more heterologous nucleic acids (HNA) to target tissues. In embodiments, the HNA sequences are transcribed and optionally, translated in the cells of the target tissue.

[0206] In some cases, the HNA encodes an antisense RNA, microRNA, siRNA, or guide RNA (gRNA). CRISPR technology has been used to target the genome of living cells for modification. Cas9 protein is a large enzyme that must be delivered efficiently to target tissues and cells to mediate gene repair through the CRISPR system and current CRISPR/Cas9 gene correction protocols suffer from a number of drawbacks. Long-term expression of Cas9 can elicit host immune responses. An additional guide RNA may be delivered via a separate vector due to packaging constraints. In embodiments, the HNA encodes a Cas9 protein or an equivalent thereof.

[0207] In embodiments, the HNA comprises a transgene encoding a protein, which may be expressed in cells of a subject to treat a disease or a disorder, resulting from reduced or eliminated activity of the native protein. Thus, in embodiments, the transgene may encode a protein selected from cystic fibrosis transmembrane conductance regulator (CFTR), N-acetyl-alpha-glucosaminidase (NAGLU), N-sulfoglucosamine sulfohydrolase (SGSH), palmitoyl-protein thioesterase 1 (PPT1), survival of motor neuron 1, telomeric (SMN1), alkaline phosphatase, biomineralization associated (ALPL, also known as TNALP), glial cell derived neurotrophic factor (GDNF), glucosylceramidase beta (GBA1), iduronidase alpha-L-(IDUA), methyl-CpG binding protein 2 (MeCP2), ceroid lipofuscinosis, neuronal, 1 (CLN1), rhodopsin (Rho), cytochrome P450 family 4 subfamily V member 2 (CYP4V2), retinoschisin 1 (RS1), phosphodiesterase 6B (PDE6B), ATP binding cassette subfamily A member 4 (ABCA4), Bestrophin-1 (BEST1), OPA1 Mitochondrial Dynamin Like GTPase (OPA1), and Optic Atrophy 3 (OPA3).

[0208] In embodiments, the transgene encodes a Cytochrome P450 family 4 subfamily V member 2 (CYP4V2). In embodiments, the CYP4V2 comprises a mutant sequence, a codon-optimized sequence, and/or a truncated sequence of CYP4V2. In embodiments, the CYP4V2 comprises, consists essentially of, or consists of a nucleic acid having the sequence of SEQ ID NO: 116, or a sequence having at least 80%, at least 85%, at least 90%, at least 95%, at least 97%, at least 98%, at least 99%, or at least 99.5% identity to SEQ ID NO: 116. In embodiments, the CYP4V2 encodes a protein that comprises, consists essentially of, or consists of an amino acid sequence of SEQ ID NO: 142, or a sequence having at least 80%, at least 85%, at least 90%, at least 95%, at least 97%, at least 98%, at least 99%, or at least 99.5% identity to SEQ ID NO: 142. In embodiments, the AAV vector or AAV vector genome of the disclosure encodes CYP4V2 and is for treating Bietti's Crystalline Dystrophy.

[0209] In embodiments, the transgene encodes a Retinoschisin 1 (RS1). In embodiments, the RS1 transgene comprises a mutant sequence, a codon-optimized sequence, and/or a truncated sequence of RS1. In embodiments, the RS1 comprises, consists essentially of, or consists of a nucleic acid having the sequence of SEQ ID NO: 117, or a sequence having at least 80%, at least 85%, at least 90%, at least 95%, at least 97%, at least 98%, at least 99%, or at least 99.5% identity to SEQ ID NO: 117. In embodiments, the RS1 encodes a protein that comprises, consists essentially of, or consists of an amino acid sequence of SEQ ID NO: 143, or a sequence having at least 80%, at least 85%, at least 90%, at least 95%, at least 97%, at least 98%, at least 99%, or at least 99.5% identity to SEQ ID NO: 143. In embodiments, the AAV vector or AAV vector genome of the disclosure encodes RS1 and is for treating Retinoschisis.

[0210] In embodiments, the transgene encodes a Phosphodiesterase 6B (PDE6B). In embodiments, the PDE6B transgene comprises a mutant sequence, a codon-optimized sequence, and/or a truncated sequence of PDE6B. In embodiments, the RS1 comprises, consists essentially of, or consists of a nucleic acid having the sequence of SEQ ID NO: 118, or a sequence having at least 80%, at least 85%, at least 90%, at least 95%, at least 97%, at least 98%, at least 99%, or at least 99.5% identity to SEQ ID NO: 118. In embodiments, the PDE6B encodes a protein that comprises, consists essentially of, or consists of an amino acid sequence of SEQ ID NO: 144, or a sequence having at least 80%, at least 85%, at least 90%, at least 95%, at least 97%, at least 98%, at least 99%, or at least 99.5% identity to SEQ ID NO: 144. In embodiments, the AAV vector or AAV vector genome of the disclosure encodes PDE6B and is for treating Retinitis pigmentosa.

[0211] In embodiments, the transgene encodes an ATP binding cassette subfamily A member 4 (ABCA4). In embodiments, the ABCA4 transgene comprises a mutant sequence, a codon-optimized sequence, and/or a truncated sequence of ABCA4. In embodiments, the ABCA4 comprises, consists essentially of, or consists of a nucleic acid having the sequence of SEQ ID NO: 172, or a sequence having at least 80%, at least 85%, at least 90%, at least 95%, at least 97%, at least 98%, at least 99%, or at least 99.5% identity to SEQ ID NO: 172. In embodiments, the ABCA4 encodes a protein that comprises, consists essentially of, or consists of an amino acid sequence of SEQ ID NO: 177, or a sequence having at least 80%, at least 85%, at least 90%, at least 95%, at least 97%, at least 98%, at least 99%, or at least 99.5% identity to SEQ ID NO: 177. In embodiments, the AAV vector or AAV vector genome of the disclosure encodes ABCA4 and is for treating Stargardt disease.

[0212] In embodiments, the transgene encodes a Bestrophin-1 (BEST1). In embodiments, the BEST1 transgene comprises a mutant sequence, a codon-optimized sequence, and/or a truncated sequence of BEST1. In embodiments, the BEST1 comprises, consists essentially of, or consists of a nucleic acid having the sequence of SEQ ID NO: 173 or 174, or a sequence having at least 80%, at least 85%, at least 90%, at least 95%, at least 97%, at least 98%, at least 99%, or at least 99.5% identity to SEQ ID NO: 173 or 174. In embodiments, the BEST1 encodes a protein that comprises, consists essentially of, or consists of an amino acid sequence of SEQ ID NO: 178 or 179, or a sequence having at least 80%, at least 85%, at least 90%, at least 95%, at least 97%, at least 98%, at least 99%, or at least 99.5% identity to SEQ ID NO: 178 or 179. In embodiments, the AAV vector or AAV vector genome of the disclosure encodes BEST1 and is for treating BEST vitelliform macular dystrophy.

[0213] In embodiments, the transgene encodes an OPA1 Mitochondrial Dynamin Like GTPase (OPA1). In embodiments, the OPA1 transgene comprises a mutant sequence, a codon-optimized sequence, and/or a truncated sequence of OPA1. In embodiments, the OPA1 transgene comprises, consists essentially of, or consists of a nucleic acid having the sequence of SEQ ID NO: 175, or a sequence having at least 80%, at least 85%, at least 90%, at least 95%, at least 97%, at least 98%, at least 99%, or at least 99.5% identity to SEQ ID NO: 175. In embodiments, the OPA1 transgene encodes a protein that comprises, consists essentially of, or consists of an amino acid sequence of SEQ ID NO: 180, or a sequence having at least 80%, at least 85%, at least 90%, at least 95%, at least 97%, at least 98%, at least 99%, or at least 99.5% identity to SEQ ID NO: 180. In embodiments, the OPA1 transgene is a DeltaS1 (ΔS1) isoform, which comprises, consists essentially of, or consists of a nucleic acid having the sequence of SEQ ID NO: 182, or a sequence having at least 80%, at least 85%, at least 90%, at least 95%, at least 97%, at least 98%, at least 99%, or at least 99.5% identity to SEQ ID NO: 182. In embodiments, the OPA1 transgene is a DeltaS1 isoform, which encodes a protein that comprises, consists essentially of, or consists of an amino acid sequence of SEQ ID NO: 183, or a sequence having at least 80%, at least 85%, at least 90%, at least 95%, at least 97%, at least 98%, at least 99%, or at least 99.5% identity to SEQ ID NO: 183. In embodiments, the OPA1 transgene is an E5b isoform, which comprises, consists essentially of, or consists of a nucleic acid having the sequence of SEQ ID NO: 184, or a sequence having at least 80%, at least 85%, at least 90%, at least 95%, at least 97%, at least 98%, at least 99%, or at least 99.5% identity to SEQ ID NO: 184. In embodiments, the OPA1 is an E5b isoform of the transgene, which encodes a protein that comprises, consists essentially of, or consists of an amino acid sequence of SEQ ID NO: 185, or a sequence having at least 80%, at least 85%, at least 90%, at least 95%, at least 97%, at least 98%, at least 99%, or at least 99.5% identity to SEQ ID NO: 185. In embodiments, the AAV vector or AAV vector genome of the disclosure encodes OPA1 and is for treating Dominant Optic Atrophy.

[0214] In embodiments, the transgene encodes an Optic Atrophy 3 (OPA3). In embodiments, the OPA3 transgene comprises a mutant sequence, a codon-optimized sequence, and/or a truncated sequence of OPA3. In embodiments, the OPA3 comprises, consists essentially of, or consists of a nucleic acid having the sequence of SEQ ID NO: 176, or a sequence having at least 80%, at least 85%, at least 90%, at least 95%, at least 97%, at least 98%, at least 99%, or at least 99.5% identity to SEQ ID NO: 176. In embodiments, the OPA3 encodes a protein that comprises, consists essentially of, or consists of an amino acid sequence of SEQ ID NO: 181, or a sequence having at least 80%, at least 85%, at least 90%, at least 95%, at least 97%, at least 98%, at least 99%, or at least 99.5% identity to SEQ ID NO: 181. In embodiments, the AAV vector or AAV vector genome of the disclosure encodes OPA3 and is for treating Dominant Optic Atrophy.

[0215] In embodiments, the transgene comprises any one of the nucleic acid sequences listed in Table 4, or a sequence having up to 5, up to 10, or up to 30 nucleotide changes to any one of the DNA sequences in Table 4 (SEQ ID NOs: 116-118 and 172-176). In embodiments, the transgene encodes any one of the amino acid sequences listed in Table 4, or a sequence having up to 1, 2, 3, 4, 5, 6, 7, 8, 9, or 10 amino acids different from any one of the amino acid sequences listed in Table 4 (SEQ ID NOs: 142-144 and 177-118).

TABLE 4
Non-limiting Examples of Transgenes

| | | Amino acid SEQ | |
|---|---|---|---|
| | Nucleic acid | ID Nos. encoded | |
| Name of transgene | SEQ ID Nos. | by transgene | Features |
| Cytochrome P450 family | 116 | 142 | Natural |
| 4 subfamily V member 2 | | | |
| (CYP4V2) | | | |
| Retinoschisin 1 (RS1) | 117 | 143 | Natural |
| Phosphodiesterase 6B | 118 | 144 | Natural |
| (PDE6B) | | | |
| ATP binding cassette | 172 | 177 | Natural |
| subfamily A member 4 | | | |
| (ABCA4) | | | |
| Bestrophin-1 (BEST1) | 173 | 178 | Natural |
| isoform 1 | | | |
| Bestrophin-1 (BEST1) | 174 | 179 | Natural |
| isoform 2 | | | |
| OPA1 Mitochondrial | 175 | 180 | Natural |
| Dynamin Like GTPase | 182 | 183 | Natural (ΔS1 |
| (OPA1) | | | isoform) |
| | 184 | 185 | Natural (E5b |
| | | | isoform) |
| Optic Atrophy 3 | 176 | 181 | Natural |
| (OPA3) | | | |

[0216] In embodiments, the transgene comprises a nucleic acid sequence set forth in any one of SEQ ID NOs: 99-133 and 172-176, or a sequence having up to 5, up to 10, or up to 30 nucleotide changes to any one of SEQ ID NOs: 99-133 and 172-176. In embodiments, the transgene encodes an amino acid sequence set forth in any one of SEQ ID NOs: 134-151 and 177-181, or a sequence having up to 1, 2, 3, 4, 5, 6, 7, 8, 9, or 10 amino acids different from any one of the amino acid sequences SEQ ID NOs: 134-151 and 177-181.

[0217] In embodiments, the heterologous nucleic acid encodes a reporter protein; for example, a fluorescent protein.

### Methods of Producing AAV Viral Vectors

[0218] A variety of approaches may be used to produce AAV viral vectors. In embodiments, packaging is achieved by using a helper virus or helper plasmid and a cell line. The helper virus or helper plasmid contains elements and sequences that facilitate viral vector production. In another aspect, the helper plasmid is stably incorporated into the genome of a packaging cell line, such that the packaging cell line does not require additional transfection with a helper plasmid.

[0219] In embodiments, the cell is a packaging or helper cell line. In embodiments, the helper cell line is eukaryotic cell; for example, an HEK 293 cell or 293T cell. In embodiments, the helper cell is a yeast cell or an insect cell.

[0220] In embodiments, the cell comprises a nucleic acid encoding a tetracycline activator protein; and a promoter that regulates expression of the tetracycline activator protein. In embodiments, the promoter that regulates expression of the tetracycline activator protein is a constitutive promoter. In embodiments, the promoter is a phosphoglycerate kinase promoter (PGK) or a CMV promoter.

[0221] A helper plasmid may comprise, for example, at least one viral helper DNA sequence derived from a replication-incompetent viral genome encoding in trans all virion proteins required to package a replication incompetent AAV, and for producing virion proteins capable of packaging the replication-incompetent AAV at high titer, without the production of replication-competent AAV.

[0222] Helper plasmids for packaging AAV are known in the art, see, e.g., U.S. Patent Pub. No. 2004/0235174 A1, incorporated herein by reference. As stated therein, an AAV helper plasmid may contain as helper virus DNA sequences, by way of non-limiting example, the Ad5 genes E2A, E4 and VA, controlled by their respective original promoters or by heterologous promoters. AAV helper plasmids may additionally contain an expression cassette for the expression of a marker protein such as a fluorescent protein to permit the simple detection of transfection of a desired target cell.

[0223] The disclosure provides methods of producing AAV particles comprising transfecting a packaging cell line with any one of the AAV helper plasmids disclosed herein; and any one of the AAV vectors disclosed herein. In embodiments, the AAV helper plasmid and the AAV vector are co-transfected into the packaging cell line. In embodiments, the cell line is a mammalian cell line, for example, human embryonic kidney (HEK) 293 cell line. The disclosure provides cells comprising any one of the AAV vectors and/or AAV particles disclosed herein.

### Pharmaceutical Compositions

[0224] The disclosure provides pharmaceutical compositions comprising any one of the AAV vectors, AAV capsids and/or AAV particles described herein. Typically, the AAV particles are administered for therapy.

[0225] The pharmaceutical composition, as described herein, may be formulated by any methods known or developed in the art of pharmacology, which include but are not limited to contacting the active ingredients (e.g., viral particles or AAV vectors) with an excipient or other accessory ingredient, dividing or packaging the product to a dose unit. The viral particles of this disclosure may be formulated with desirable features, e.g., increased stability, increased cell transfection, sustained or delayed release, biodistributions or tropisms, modulated or enhanced translation of encoded protein in vivo, and the release profile of encoded protein in vivo.

[0226] As such, the pharmaceutical composition may further comprise saline, lipidoids, liposomes, lipid nanoparticles, polymers, lipoplexes, core-shell nanoparticles, peptides, proteins, cells transfected with AAV vectors or transduced with AAV viral particles (e.g., for transplantation into a subject), nanoparticle mimics or combinations thereof. In embodiments, the pharmaceutical composition is formulated as a nanoparticle. In embodiments, the nanoparticle is a self-assembled nucleic acid nanoparticle.

[0227] A pharmaceutical composition in accordance with the present disclosure may be prepared, packaged, and/or sold in bulk, as a single unit dose, and/or as a plurality of single unit doses. The amount of the active ingredient is generally equal to the dosage of the active ingredient which would be administered to a subject and/or a convenient fraction of such a dosage such as, for example, one-half or one-third of such a dosage. The formulations of the invention can include one or more excipients, each in an amount that together increases the stability of the viral vector, increases cell transfection or transduction by the viral vector, increases the expression of viral vector encoded protein, and/or alters the release profile of viral vector encoded proteins. In embodiments, the pharmaceutical composition comprises an excipient. Non limiting examples of excipients include solvents, dispersion media, diluents, or other liquid vehicles, dispersion or suspension aids, surface active agents, isotonic agents, thickening or emulsifying agents, preservatives, or combination thereof.

[0228] In embodiments, the pharmaceutical composition comprises a cryoprotectant. The term “cryoprotectant” refers to an agent capable of reducing or eliminating damage to a substance during freezing. Non-limiting examples of cryoprotectants include sucrose, trehalose, lactose, glycerol, dextrose, raffinose and/or mannitol.

### Therapeutic Methods

[0229] This disclosure provides methods of preventing or treating a disorder, comprising, consisting essentially of, or consisting of administering to a subject a therapeutically effective amount of any one of the pharmaceutical compositions disclosed herein.

[0230] In embodiments, the disorder is a CNS disorder, a skin disorder, a lung disorder, a muscle disorder, a liver disorder, or an ophthalmic disease (or a retinal disease). In embodiments, the disorder is cystic fibrosis. In embodiments, the disorder is an ophthalmic disease. In embodiments, the disorder is a retinal disease.

[0231] In embodiments, the disorder is hypophosphatasia, amyotrophic lateral sclerosis (ALS), spinal muscular atrophy (SMA), recessive dystrophic epidermolysis bullosa (RDEB), lysosomal storage disorder (including Duchenne's Muscular Dystrophy, and Becker muscular dystrophy), juvenile Batten disease, infantile Batten disease, autosomal dominant disorders, muscular dystrophy, Bietti's Crystalline Dystrophy, retinoschisis (e.g., degenerative, hereditary, tractional, exudative), hemophilia A, hemophilia B, multiple sclerosis, diabetes mellitus, Fabry disease, Pompe disease, neuronal ceroid lipofuscinosis 1 (CLN1), CLN3 disease (or Juvenile Neuronal Ceroid Lipofuscinosis), Gaucher disease, cancer, arthritis, muscle wasting, heart disease, intimal hyperplasia, Rett syndrome, epilepsy, Huntington's disease, Parkinson's disease, Alzheimer's disease, an autoimmune disease, cystic fibrosis, thalassemia, Hurler's Syndrome (MPS IH), Sly syndrome, Scheie Syndrome, Hurler-Scheie Syndrome, Hunter's Syndrome, Sanfilippo Syndrome A (mucopolysaccharidosis IIIA or MPS IIIA), Sanfilippo Syndrome B (mucopolysaccharidosis IIIB or MPS IIIB), Sanfilippo Syndrome C, Sanfilippo Syndrome D, Morquio Syndrome, Maroteaux-Lamy Syndrome, Krabbe's disease, phenylketonuria, spinal cerebral ataxia, LDL receptor deficiency, hyperammonemia, anemia, arthritis, or adenosine deaminase deficiency.

[0232] In embodiments, the disorder is X-linked retinoschisis (XLRS), a rare, monogenic disease that results in severe visual impairment. While female carriers are asymptomatic, affected males usually begin exhibiting disease symptoms within the first decade, and occasionally during infancy. The disease results from mutations in the RS1 gene, which is expressed in photoreceptors and retinal bipolar cells. The gene product is a secreted protein that localizes primarily to the inner segment of photoreceptor cells, and more diffusely to the rest of the neural retina. RS1 forms a homo-octameric complex and is thought to mediate cell-cell adhesion via interactions with extracellular epitopes of membrane proteins. In individuals with XLRS, cavities develop where the adhesion of adjacent retinal layers is disrupted, typically in the outer plexiform layer where photoreceptors synapse with inner retinal neurons. This leads to discontinuity within the retinal circuitry, photoreceptor degeneration, and impaired visual acuity. Many of the RS1 mutations that have been reported in the literature are point mutations that are predicted to disrupt secretion of the protein and are therefore functionally equivalent to a null allele. The current standard of care for XLRS patients is palliative and involves correction of refractive errors, low-vision aids, and genetic counseling. Complications such as retinal detachment (up to 22% of patients) and vitreal hemorrhage (up to 40% of patients) are most frequent in the later stages of disease and can be treated surgically. Early intervention via gene therapy has significant potential to reverse or stabilize disease progression at early stages of disease and prevent significant vision loss as well as the occurrence of these more severe complications.

[0233] In embodiments, the disorder is Autosomal Dominant Optic Atrophy (ADOA). ADOA is caused by Opa1 mutations, resulting in vision loss in the second to third decade of life. In embodiments, Opa1 homozygous mutants are embryonic lethal and therefore do not survive past E9-12. Heterozygous (HT) animals survive to term but have retinal degeneration, neurological defects, and musculoskeletal complications over time. Mice show Optic nerve atrophy upon fundus and Scanning Laser Ophthalmoscopy (SLO) exams well as decreased Electroretinogram (ERG) amplitudes, and fibrosis in the inner limiting membrane (ILM), and retinal nerve fiber layer (RNFL). Opa1 has been shown to be involved in mitochondrial christae structure, mitochondrial fusion, and mitochondrial inner membrane remodeling.

[0234] In embodiments, the disclosure provides methods of expressing a transgene in a retinal cell. In embodiments, the method comprises delivering a nucleic acid of the disclosure to the retinal cell. In embodiments, the method comprises transducing the retinal cell with the AAV viral vector of the disclosure.

[0235] In embodiments, the target cells of the disclosure comprise retinal cells. In embodiments, the retinal cells comprise a photoreceptor, a bipolar cell, a retinal ganglion cell, a horizontal cell, or an amacrine cell. In embodiments, the retinal cells comprise a retinal ganglion cell. In embodiments, the retinal cells comprise a bipolar cell. In embodiments, the retinal cells comprise a horizontal cell. In embodiments, the retinal cells comprise an amacrine cell. In embodiments, the retinal cells comprise a photoreceptor. In embodiments, the photoreceptor comprises a rod cell and/or a cone cell.

[0236] In embodiments, the target cells of the disclosure comprise, consist essentially of, or consist of photoreceptor cells. In embodiments, the transgene of the disclosure is operably linked to a RK promoter for selective expression in photoreceptor cells.

[0237] In addition to specific transgenes disclosed herein, known active enzyme sequences may be used as transgenes to deliver functional enzyme activity.

[0238] In embodiments, the disorder is CLN3 disease. CLN3 disease or Juvenile Neuronal Ceroid Lipofuscinosis is a lysosomal storage disease caused by an autosomal recessively inherited mutation in the CLN3 gene. CLN3 disease is a progressive neurodegenerative disorder in which the central nervous system (CNS) is greatly affected resulting in behavioral issues, vision loss, and other cognitive disabilities.

[0239] In embodiments, the disorder is Fabry disease. Fabry disease is an X-linked lysosomal storage disorder caused by a deficiency in alpha-galactosidase A (GLA) activity that results in the accumulation of the glycolipid products, globotriaosylceramide (Gb3) and lyso-Gb3 in the lysosome. Disease presentation is highly heterogeneous but usually includes frequent bouts of peripheral neurotrophic pain, angiokeratomas, reduced sweat production, corneal dystrophy, and gastrointestinal complications. As the disease progresses patients suffer from cardiomyopathy, renal insufficiency and cerebrovascular disease, all of which are the primary causes of reduced life-span in Fabry patients. While males are the most severely affected population of patients with mutations in the GLA gene, it has become increasingly clear that female patients are also frequently symptomatic but are often misdiagnosed. Enzyme replacement therapy (ERT) is currently the only FDA-approved therapy to treat Fabry and requires bi-weekly injections of relatively large quantities of recombinant protein. While ERT reduces the accumulation of Gb3 in the heart, kidney and vasculature it fails to completely treat all symptoms of Fabry, primarily due to its inability to efficiently enter the CNS. Gene therapy strategies have been investigated and while many show great promise in correcting the glycolipid accumulation, most have failed to efficiently enter the CNS and also suffered from an immune response often seen during GLA replacement.

[0240] In embodiments, the AAV viral vectors disclosed herein are used to treat Fabry disease in patients, who are unresponsive to ERT, or when ERT fails to address all symptoms. In embodiments, the AAV viral vectors disclosed herein are used to treat Fabry disease in patients who have already been administered ERT.

[0241] In embodiments, the disorder is Pompe disease. Pompe disease is a lysosomal storage disorder caused by a deficiency in acid α-glucosidase (GAA) activity that results in the accumulation of glycogen in the lysosome. The disease presents as a form of muscular dystrophy which primarily affects both smooth and striated musculature as well as the central nervous system (CNS), with early mortality. Enzyme replacement therapy (ERT) is currently the only FDA-approved therapy to treat Pompe and requires bi-weekly injections of relatively large quantities of recombinant protein. While ERT significantly reduces the mortality rate of infantile Pompe patients, who typically die by the age of two without therapy, it fails to completely ameliorate all symptoms of Pompe, primarily due to its inability to efficiently enter the CNS and resulting immune responses to the GAA protein. Gene therapy strategies have been investigated and while many show great promise in correcting the glycogen accumulation and other symptoms of Pompe. Most have suffered from the severe immune response seen during GAA replacement. Previous work has demonstrated that hepatic-specific expression can make animals tolerate to the GAA protein and significantly reduce the humoral response.

[0242] In embodiments, the AAV viral vectors disclosed herein are used to treat Pompe disease in patients who have already been administered ERT; for example those who are unresponsive to ERT, or when ERT fails to address all their symptoms.

[0243] In embodiments, the AAV viral vectors disclosed herein are used to treat a cancer. In embodiments, the cancer is a solid cancer; for example, bladder, breast, cervical, colon, rectal, endometrial, kidney, lip, oral, liver, melanoma, mesothelioma, non-small cell lung, non-melanoma skin, ovarian, pancreatic, prostate, sarcoma, small cell lung tumor, or thyroid.

[0244] In embodiments, the disorder is an ophthalmic disease. The eye is immune privileged tissue. Only a very small number of viruses is necessary for therapeutic benefit. In embodiments, the ophthalmic disease affects photoreceptor and RPE cells. In embodiments, the ophthalmic disease comprises, consists essentially of, or consists of retinitis pigmentosa (e.g., autosomal recessive (SPATA7 gene; LRAT gene; TULP1 gene), autosomal dominant (AIPL1 gene), and X-linked (RPGR gene)), eye disorders related to mutations in the bestrophin-1 (BEST-1 or BEST1) gene (e.g., vitelliform macular dystrophy, age-related macular degeneration, autosomal dominant vitreoretinochoroidopathy, glaucoma, cataracts), Leber congenital amaurosis (LCA; aryl-hydrocarbon interacting protein-like 1 (AIPL1) gene), cone-rod dystrophy (CRD; ABCA4 gene), Stargardt's (ABCA4 gene), choroideremia (CHM gene), Usher Syndrome (MYO7A gene; CDH23 gene; USH2A gene; CLRN1 gene), Dominant Optic Atrophy (e.g., autosomal (OPA1 gene; OPA3 gene)), retinitis pigmentosa (PDE6B gene), retinoschisis (RS1 gene), Bietti's Crystalline Dystrophy (CYP4V2 gene) or Achromatopsia (CNGA3 gene, CNGB3 gene, GNAT2 gene, PDE6C gene, or PDE6H gene).

[0245] In embodiments, the disclosure provides methods of expressing a transgene in a retinal cell. In embodiments, the method comprises delivering a nucleic acid of the disclosure to the retinal cell. In embodiments, the method comprises transducing the retinal cell with the AAV viral vector of the disclosure.

[0246] In embodiments, the target cells of the disclosure comprise retinal cells. In embodiments, the retinal cells comprise a photoreceptor, a bipolar cell, a retinal ganglion cell, a horizontal cell, or an amacrine cell. In embodiments, the retinal cells comprise a retinal ganglion cell. In embodiments, the retinal cells comprise a bipolar cell. In embodiments, the retinal cells comprise a horizontal cell. In embodiments, the retinal cells comprise an amacrine cell. In embodiments, the retinal cells comprise a photoreceptor. In embodiments, the photoreceptor comprises a rod cell and/or a cone cell.

[0247] In embodiments, the target cells of the disclosure comprise, consist essentially of, or consist of photoreceptor cells.

[0248] In In embodiments, the subject is a mammal; for example, a human. In particular aspects, the human is an infant human; for example, under 3 years old, 2 years old, or under 1 year old.

[0249] The methods of treatment and prevention disclosed herein may be combined with appropriate diagnostic techniques to identify and select patients for the therapy or prevention. For example, the method of treating or preventing a disorder disclosed herein may further comprise steps of performing a genetic test to identify a gene mutation or deletion related to the disorder in the subject. In embodiments, the method of treating or preventing a disorder comprises administering to a subject who has been previously identified as carrying a mutation related to the disorder, or as being at high risk for developing the disorder (for example, based on hereditary factors).

[0250] The disclosure provides methods of increasing the level of a protein in a host cell, comprising contacting the host cell with any one of the AAV particles disclosed herein, wherein the AAV particle comprises any one of the AAV vector genomes disclosed herein, comprising an HNA sequence encoding the protein. In embodiments, the protein is a therapeutic protein. In embodiments, the host cell is in vitro, in vivo, or ex vivo. In embodiments, the host cell is derived from a subject. In embodiments, the subject suffers from a disorder, which results in a reduced level and/or functionality of the protein, as compared to the level and/or functionality of the protein in a normal subject.

[0251] In embodiments, the level of the protein is increased to level of about 1×10⁻⁷ ng, about 3×10⁻⁷ ng, about 5×10⁻⁷ ng, about 7×10⁻⁷ ng, about 9×10⁻⁷ ng, about 1×10⁻⁶ ng, about 2×10⁻⁶ ng, about 3×10⁻⁶ ng, about 4×10⁻⁶ ng, about 6×10⁻⁶ ng, about 7×10⁻⁶ ng, about 8×10⁻⁶ ng, about 9×10⁻⁶ ng, about 10×10⁻⁶ ng, about 12×10⁻⁶ ng, about 14×10⁻⁶ ng, about 16×10⁻⁶ ng, about 18×10⁻⁶ ng, about 20×10⁻⁶ ng, about 25×10⁻⁶ ng, about 30×10⁻⁶ ng, about 35×10⁻⁶ ng, about 40×10⁻⁶ ng, about 45×10⁻⁶ ng, about 50×10⁻⁶ ng, about 55×10⁻⁶ ng, about 60×10⁻⁶ ng, about 65×10⁻⁶ ng, about 70×10⁻⁶ ng, about 75×10⁻⁶ ng, about 80×10⁻⁶ ng, about 85×10⁻⁶ ng, about 90×10⁻⁶ ng, about 95×10⁻⁶ ng, about 10×10⁻⁵ ng, about 20×10⁻⁵ ng, about 30×10⁻⁵ ng, about 40×10⁻⁵ ng, about 50×10⁻⁵ ng, about 60×10⁻⁵ ng, about 70×10⁻⁵ ng, about 80×10⁻⁵ ng, or about 90×10⁻⁵ ng in the host cell.

[0252] The disclosure provides methods of introducing a gene of interest to a cell in a subject comprising contacting the cell with an effective amount of any one of the AAV viral particles disclosed herein, wherein the AAV viral particle contains any one of the AAV vector genomes disclosed herein, comprising the gene of interest.

### Dosage and Administration

[0253] Methods of determining the most effective means and dosage of administration are known to those of skill in the art and will vary with the composition used for therapy, the purpose of the therapy and the subject being treated. Single or multiple administrations can be carried out with the dose level and pattern being selected by the treating physician. It is noted that dosage may be impacted by the route of administration. Suitable dosage formulations and methods of administering the agents are known in the art. Non-limiting examples of such suitable dosages may be as low as 10⁹ vector genomes to as much as 10¹⁷ vector genomes per administration.

[0254] In embodiments, the disclosure provides methods of treating a disease or disorder in a subject in need thereof, comprises administering an effective amount of the therapeutic agent (e.g., AAV viral vector) to the subject.

[0255] In embodiments of the methods described herein, the number of viral particles (e.g., AAV) administered to the subject ranges from about 10⁹ to about 10¹⁷. In embodiments, about 10¹⁰ to about 10¹², about 10¹¹ to about 10¹³, about 10¹¹ to about 10¹², about 10¹¹ to about 10¹⁴, about 5×10¹¹ to about 5×10¹², or about 10¹² to about 10¹³ viral particles are administered to the subject. In embodiments, the amount of viral genomes (vg) administered to the subject ranges from about 10⁹ to about 10¹⁷. In embodiments, about 10¹⁰, 2×10¹⁰, 3×10¹⁰, 4×10¹⁰, 5×10¹⁰, 6×10¹⁰, 7×10¹⁰, 8×10¹⁰, 9×10¹⁰, 10¹¹, 2×10¹¹, 3×10¹¹, 4×10¹¹, 5×10¹¹, 6×10¹¹, 7×10¹¹, 8×10¹¹, 9×10¹¹, or 10¹², viral genomes (vg) are administered to the subject. In embodiments, about 10¹⁰ to about 10¹¹, about 10¹¹ to about 10¹², about 10¹² to about 10¹³ vg, about 5×10⁹ to about 5×10¹⁰, about 5×10¹⁰ to about 5×10¹¹, about 5×10¹¹ to about 5×10¹², about 10¹⁰ to about 10¹², about 10¹¹ to about 10¹³, about 10¹⁰ to about 10¹³, or about 10¹¹ to about 10¹⁴, viral genomes (vg) are administered to the subject. For administration to a human eye, a total dose of about 1×10¹⁰ vg/eye may be used, and a total dose of 5×10⁹ vg/eye may be used for a mouse eye. Non-invasive, in vivo imaging techniques can be used to monitor efficacy/safety in animals, which include but are not limited to scanning laser ophthalmoscopy (SLO), optical coherence tomography (OCT), multi-photon microscopy, fluorescein angiography.

[0256] In embodiments, the AAV particles repair the gene deficiency in a subject. In embodiments, the ratio of repaired target polynucleotide or polypeptide to unrepaired target polynucleotide or polypeptide in a successfully treated cell, tissue, organ or subject is at least about 1.5:1, about 2:1, about 3:1, about 4:1, about 5:1, about 6:1, about 7:1, about 8:1, about 9:1, about 10:1, about 20:1, about 50:1, about 100:1, about 1000:1, about 10,000:1, about 100,000:1, or about 1,000,000:1. The amount or ratio of repaired target polynucleotide or polypeptide can be determined by any method known in the art, including but not limited to Western analysis, Northern analysis, Southern analysis, PCR, sequencing, mass spectrometry, flow cytometry, immunohistochemistry (IHC), immunofluorescence, fluorescence in situ hybridization, next generation sequencing, immunoblot, and ELISA.

[0257] In embodiments, the viral particle is introduced to the subject intravenously, intrathecally, intracerebrally, intraventricularly, intranasally, intratracheally, intra-aurally, intra-ocularly, or peri-ocularly, orally, rectally, transmucosally, inhalationally, transdermally, parenterally, subcutaneously, intradermally, intramuscularly, intrapleurally, topically, intralymphatically, intracisternally; such introduction may also be intra-arterial, intracardiac, subventricular, epidural, intracerebral, intracerebroventricular, sub-retinal, para-retinal, intravitreal, intraarticular, intraperitoneal, intrauterine, or any combination thereof. In embodiments, the viral particles are delivered to a desired target tissue, e.g., to the lung, eye, or CNS, as non-limiting examples. In embodiments, delivery of viral particles is systemic. The intracisternal route of administration involves administration of a drug directly into the cerebrospinal fluid of the brain ventricles. It could be performed by direct injection into the cisterna magna or via a permanently positioned tube.

[0258] For treating an ophthalmic disease (or an eye disorder) intraocularly, there are multiple modes of administration known to those skilled in the art, including but not limited to: lacrimal gland (LG) administration, topical eye drop, intra-stromal administration to the cornea, intra-cameral administration (anterior chamber), intravitreal administration, sub-retinal administration, para-retinal administration, systemic administration, or a combination thereof. 80% of genetic eye disorders occur in the photoreceptors. Intravitreal delivery of small volume gene therapies can occur in an out-patient clinic.

[0259] In embodiments, the mode of administration is para-retinal administration. As used herein, the term “para-retinal administration” refers to a form of intravitreal administration that injects the therapeutic agent (e.g., an AAV viral vector) into the vitreous cavity in close proximity to the desired region of the retina (i.e., targeted delivery). In embodiments, the desired region of the retina is near the fovea area of the retina. In contrast to routine intravitreal administrations, which are done using short needles designed to deposit product in the mid-vitreous cavity, and do not require direct visualization, para-retinal injection is done under direct visualization of a longer needle capable of delivering product in the posterior vitreous cavity close to the retina. In embodiments, the therapeutic agent is deposited in the vitreous cavity at a distance of 0 mm to 13 mm from the surface of the retina, at a distance of 0 mm to 10 mm from the surface of the retina, at a distance of 0 mm to 5 mm from the surface of the retina, or at a distance of 0 mm to 3 mm from the surface of the retina. In embodiments, the therapeutic agent is deposited in the vitreous cavity at a distance of between 0-13 mm, between 0-12 mm, between 0-11 mm, between 0-10 mm, between 0-9 mm, between 0-8 mm, between 0-7 mm, between 0-6 mm, between 0-5 mm, between 0-4 mm, between 0-3 mm, between 0-2 mm, or between 0-1 mm, from the surface of the retina.

[0260] In embodiments, para-retinal administration is used in situations in which sub-retinal injection is not appropriate. In embodiments, para-retinal administration is used for targeted transduction of optic nerves. In embodiments, para-retinal administration is used for treating diseases or disorders that are related to dysfunction of the optic nerves. In embodiments, para-retinal administration is used for treating Dominant Optic Atrophy or Retinoschisis.

[0261] In embodiments, para-retinal administration involves the use of a small gauge needle (30 gauge or similar) with length sufficient to reach the posterior pole of the human eye (25 mm or similar), exo- or endo-illumination and visualization using a microscope, and use of a corneal contact lens to allow focus on the posterior vitreous cavity and retina. This is typically conducted after adequate analgesia and antisepsis, at which time the corneal contact lens is coupled to the eye and the microscope is positioned to view the posterior retina. The needle is inserted through the eye wall in the pars plana region and its tip is visualized. Under direct visualization, the needle tip is advanced to the desired location close to the retinal surface. The syringe plunger is advanced to slowly deposit the viral vector (which may be contained in any suitable composition or formulation). The needle is withdrawn and the eye is inspected. The port may be closed with a suture, but for a sufficiently small-caliber needle (such as 30 gauge), no suture is needed to close the needle tract. Ointment and an eye shield may be applied and, if desired, the subject can be kept in a supine position for a period post-operatively to further facilitate a high para-retinal concentration of the product. Variations on delivery instrumentation can include creation of a sclerotomy with or without the use of a vitrectomy port to allow use of a blunt cannula, and/or a cannula design with a tapered and/or flexible extendable tip or side ports to optimize proximity to the retinal surface and safety, and/or use of a pneumatic system in lieu of a simple syringe plunger. Additional descriptions of para-retinal administration are disclosed, for example, in WO 2020/018766 and Zeng et al., Mol Ther Methods Clin Dev. 2020 Sep. 11; 18:422-427, the contents of each of which are incorporated herein by reference in their entireties for all purposes.

[0262] In embodiments, the mode of administration is sub-retinal administration, which injects the materials into the sub-retinal space between retinal pigment epithelium (RPE) cells and photoreceptors. In the sub-retinal space, the injected materials come into direct contact with the plasma membrane of the photoreceptor, and RPE cells and sub-retinal blebs. In embodiments, the AAV used for sub-retinal administration comprises the capsid protein of AAV214 or AAV214-D5. In embodiments, the sub-retinal administration is for treating ADOA, XLRS, Stargardt disease, Bietti's Crystalline Dystrophy, or BEST vitelliform macular dystrophy. Additional descriptions of sub-retinal administration are disclosed, for example, in Peng et. al., Ophthalmic Res 2017; 58:217-226; and Hartman et al., J Ocul Pharmacol Ther. 2018 Mar. 1; 34 (1-2): 141-153, the contents of each of which are incorporated herein by reference in their entireties for all purposes.

[0263] Administration of the AAV viral particle or compositions of this disclosure can be effected in one dose, continuously or intermittently throughout the course of treatment. In embodiments, the AAV viral particle or compositions of this disclosure are parenterally administered by injection, infusion or implantation.

[0264] In embodiments, the AAV particles of this disclosure show enhanced tropism for brain and cervical spine. In embodiments, the viral particles of the disclosure can cross the blood-brain-barrier (BBB). In embodiments, the AAV particles of this disclosure show high retinal tropism by para-retinal, sub-retinal and/or intravitreal injections. In embodiments, the AAV particles of this disclosure target multiple eye cell types, such as, for example, cones, rods, and retinal pigment epithelium (RPE). In embodiments, AAV particles of this disclosure escape neutralizing antibodies against natural serotypes, and thus enable potential redosing. In a further aspect, the AAV particles and compositions of the disclosure may be administered in combination with other known treatments for the disorder being treated.

### Kits

[0265] The agents, viral vectors, or compositions described herein may, in embodiments, be assembled into pharmaceutical or diagnostic or research kits to facilitate their use in therapeutic, diagnostic or research applications. In embodiments, the kits of the present disclosure include any one of the modified AAV capsid proteins, AAV vectors, AAV viral particles, host cells, isolated tissues, compositions, or pharmaceutical compositions as described herein.

[0266] In embodiments, a kit further comprises instructions for use. Specifically, such kits may include one or more agents described herein, along with instructions describing the intended application and the proper use of these agents. As an example, in embodiments, the kit may include instructions for mixing one or more components of the kit and/or isolating and mixing a sample and applying to a subject. In embodiments, agents in a kit are in a pharmaceutical formulation and dosage suitable for a particular application and for a method of administration of the agents. Kits for research purposes may contain the components in appropriate concentrations or quantities for running various experiments.

[0267] The kit may be designed to facilitate use of the methods described herein and can take many forms. Each of the compositions of the kit, where applicable, may be provided in liquid form (e.g., in solution), or in solid form, (e.g., a dry powder). In certain cases, some of the compositions may be constitutable or otherwise processable (e.g., to an active form), for example, by the addition of a suitable solvent or other species (for example, water or a cell culture medium), which may or may not be provided with the kit. In embodiments, the compositions may be provided in a preservation solution (e.g., cryopreservation solution). Non-limiting examples of preservation solutions include DMSO, paraformaldehyde, and CryoStor® (Stem Cell Technologies, Vancouver, Canada). In embodiments, the preservation solution contains an amount of metalloprotease inhibitors.

[0268] In embodiments, the kit contains any one or more of the components described herein in one or more containers. Thus, in embodiments, the kit may include a container housing agents described herein. The agents may be in the form of a liquid, gel or solid (powder). The agents may be prepared sterilely, packaged in a syringe and shipped refrigerated. Alternatively, they may be housed in a vial or other container for storage. A second container may have other agents prepared sterilely. Alternatively, the kit may include the active agents premixed and shipped in a syringe, vial, tube, or other container. The kit may have one or more or all of the components required to administer the agents to a subject, such as a syringe, topical application devices, or IV needle tubing and bag.

[0269] It is to be understood that while the invention has been described in conjunction with the above embodiments, the foregoing description and examples are intended to illustrate and not limit the scope of the invention. Other aspects, advantages and modifications within the scope of the invention will be apparent to those skilled in the art to which the invention pertains.

[0270] In addition, where features or aspects of the invention are described in terms of Markush groups, those skilled in the art will recognize that the invention is also thereby described in terms of any individual member or subgroup of members of the Markush group.

### EXAMPLES

### Example 1: Characterization of Non-Human Primate Para-Retinal and Sub-Retinal Dosing Using Various AAV Viral Vectors

[0271] The transduction efficiency of the AAV viral vectors comprising an AAV204, AAV214, AAV214-D5, or AAV8 capsid via multiple ocular administration modes was assessed as described below.

[0272] All AAV viral vectors used in this example comprises a recombinant nucleic acid encoding an enhanced green fluorescence protein (“EGFP” or “GFP” hereinafter) reporter transgene that is operably linked to the CBh promoter.

[0273] To test transduction efficiency of the AAV viral vectors in vivo, non-human primates (NHP) Macaca fascicularis were dosed by para-retinal, sub-retinal, or intravitreal administration of the indicated AAV viral vectors. The dose/volume for each administration mode were:
[0274] Para-retinal dosing—1.0E+11 vg in 100 μL injection volume
[0275] Sub-retinal dosing—2.5E+10 vg in 100 μL injection volume
[0276] Intravitreal dosing—1.5E+12 vg in 150 μL injection volume
   Para-retinal administration was performed by layering virus on top of the retina between the vitreous and the inner limiting membrane, thus not creating a subretinal detachment. GFP expression was monitored using scanning laser ophthalmoscopy (SLO). SLO images were taken on samples collected 26-27 days post injection. At 28 days post-injection, eyes were collected, processed, and analyzed by immunohistochemistry.

[0277] FIGS. 2B-2E shows the SLO results of para-retinal injection of the AAV viral vectors comprising the capsid protein of AAV204 (FIG. 2B), AAV8 (FIG. 2C), AAV214 (FIG. 2D), or AAV214-D5 (FIG. 2E). Among the capsid proteins tested, the AAV viral vector comprising AAV204 capsid demonstrates robust transduction in the macular, papillomacular bundle, and retinal nerve fibers via para-retinal injection, with a much higher transduction efficiency compared to other tested capsids.

[0278] In addition, the para-retinal administration of the AAV viral vector comprising AAV204 capsid (FIG. 2B) also shows much higher local transduction efficiency (particularly for optical nerve transduction) compared to the traditional intravitreal administration of the same AAV viral vector (FIG. 2A).

[0279] To further compare the transduction efficiency of these two administration routes, the retinas were processed for imaging analysis (FIGS. 3A-3C). Again, retinas receiving para-retinal administration of the AAV viral vector comprising AAV204 capsid (FIGS. 3B-3C) demonstrates much more robust macular and optic nerve transduction than the retinas receiving intravitreal administration of the same AAV viral vector (FIG. 3A).

[0280] Further immunohistochemistry analysis of rhodopsin and GFP 1-month post para-retinal injection of AAV204 viral vectors (FIG. 3D) showed high GFP expression in retinal ganglion cells (RGCs) across the entire retina and nerve fibers with high GFP expression were observed along the retina and entering the optic nerve. In comparison, para-retinal injection of AAV8 viral vectors (FIG. 3D) showed much lower GFP expression in RGCs. As shown in FIGS. 3E-3F, para-retinal administration of AAV204 viral vectors also resulted in robust GFP expression in NHP fovea and along the the papillomacular bundle between the macula and optic nerve. These results were consistent with the SLO analysis. Thus, para-retinal administration of AAV204 viral vector results in efficient transduction of target cells in the macula and foveal pit as well as retinal ganglion cells and the associated retinal nerve fibers extending to the optic nerve, at a dose that is at least 10-fold lower compared to intravitreal AAV injections commonly used in the field.

[0281] The transduction efficiency of the AAV viral vectors comprising the capsid protein of AAV8 (FIGS. 4A, 4D), AAV214 (FIGS. 4B, 4E), and AAV214-D5 (FIG. 4C, 4F) was also assessed. The results show that these 3 capsids display similar transduction efficiency when administered sub-retinally.

[0282] Conclusions: These results show that para-retinal injection of AAV vectors comprising AAV204 capsid can efficiently deliver the payload to the macula or optic nerve/retinal ganglion cell layer.

### Example 2: In Vitro Characterization of AAV Vector Genomes Comprising Human Opa1 Expression Cassette

[0283] Multiple AAV vector genomes expression vectors were constructed for expression of human Opa1 (hOpa1) according to FIG. 7, including:
[0284] pA-Opa1_1 (comprising SEQ ID NO: 230; generated from a DNA template vector comprising SEQ ID NO: 186);
[0285] pA-Opa1_3 (comprising SEQ ID NO: 231; generated from a DNA template vector comprising SEQ ID NO: 187);
[0286] pA-Opa1_5 (comprising SEQ ID NO: 232; generated from a DNA template vector comprising SEQ ID NO: 188);
[0287] pA-Opa1_11 (comprising SEQ ID NO: 233; generated from a DNA template vector comprising SEQ ID NO: 189);
[0288] pA-Opa1_13 (comprising SEQ ID NO: 234; generated from a DNA template vector comprising SEQ ID NO: 190);
[0289] pA-Opa1_15 (comprising SEQ ID NO: 235; generated from a DNA template vector comprising SEQ ID NO: 191);
[0290] pA-Opa1_17 (comprising SEQ ID NO: 236; generated from a DNA template vector comprising SEQ ID NO: 192);
[0291] pA-Opa1_21 (comprising SEQ ID NO: 237; generated from a DNA template vector comprising SEQ ID NO: 193);
[0292] pA-Opa1_25 (comprising SEQ ID NO: 238; generated from a DNA template vector comprising SEQ ID NO: 194); and
[0293] pA-Opa1_27 (comprising SEQ ID NO: 239; generated from a DNA template vector comprising SEQ ID NO: 195).

[0294] Each vector genome construct comprises, from 5′ to 3′, a promoter (CBh promoter (SEQ ID NO: 154) or MeCP2 promoter (SEQ ID NO: 156)), an intron (SEQ ID NO: 200), an hOpa1 open reading frame, and BGH polyA signal (SEQ ID NO: 201 or 225), which are flanked by 5′ and 3′ ITRs. In addition, most constructs contained telomeric repeats (TR) downstream of the BGH polyA signal and optionally upstream of the promoter. Specifically, pA-Opa1_1 contains no TR; both pA-Opa1-3 and pA-Opa1-5 contain a first TR (SEQ ID NO: 202) and a second TR (SEQ ID NO: 203) downstream of the BGH poly A signal; and the other AAV vector genomes contain both a first TR (SEQ ID NO: 202) downstream of the BGH polyA signal and a second TR (SEQ ID NO: 203) upstream of the promoter. The Opa1 transgene is operably linked to CBh promoter in most AAV vector genomes, except that in pA-Opa1_5 and pA-Opa1_13 the Opa1 transgene is operably linked to MeCP2 promoter. In addition, the transgene in pA-Opa1_15 and pA-Opa1_25 is human Opa1 ΔS1 isoform, and the transgene in pA-Opa1_17 and pA-Opa1_27 is human Opa1 E5b isoform. The pA-Opa1_2× constructs further comprise a 3×FLAG tag fused to the 3′ end of the human Opa1 open reading frame.

[0295] After preparation of plasmid DNA of each AAV vector genome, 293 cells were transfected with 1 μg of plasmid DNA and incubated at 37° C., 5% CO₂ for 48 hours prior to collection of protein lysates. Opa1 expression was examined using Western analysis (FIG. 8A). In addition, the AAV capsid packaging capability of these AAV vector genomes were analyzed by measuring virus production yield (FIG. 8B; the X-axis shows the relative units corresponding to DNase resistant viral genome number in a given volume of virus production medium). The ability of AAV viral vectors to infect cells and express Opa1 protein was assessed for the indicated vector genomes. Opa1 expression by each vector genome was detected by an anti-Opa1 antibody (FIG. 9A, upper panel and FIG. 9B, lanes 5-13) or by anti-FLAG antibody (FIG. 9A, lower panel and FIG. 9B, lanes 2-4). In addition, Opa1 expression was also analyzed by protein staining in transfected Opa1 (−/−) cell line (FIG. 9C).

[0296] The results showed that pA-Opa1_3 produced about 4-fold lower Opa1 expression compared to pA-Opa1_1 in 293 cells, and the expression from pA-Opa1_5 was even lower than pA-Opa1_3. Neither pA-Opa1_3 nor pA-Opa1_5 was capable of efficiently packaging into an AAV capsid. On the other hand, pA-Opa1_11 yielded better Opa1 expression than pA-Opa1_1, and pA-Opa1_13 also showed better Opa1 expression compared to pA-Opa1_5. In addition, both pA-Opa1_11 and pA-Opa1_13 were capable of efficiently packaging into an AAV capsid. Thus, introducing the telomeric repeats flanking both 5′ and 3′ side of the Opa1 expression cassette improves Opa1 expression as well as packaging of the AAV vector genome.

### Example 3: In Vivo Study of Dominant Optic Atrophy Treatment Using AAV Viral Vectors Encoding OPA1

[0297] To investigate Opa1 expression in vivo, animal studies were conducted according to FIG. 10A. Briefly, Opa1 −/+ mice in three treatment groups were injected at one month of age with AAV204 viral vector containing pA-Opa1_21 (high or low dose), or pA-Opa1_27, according to Table 7 below via intravitreal injection into the retinal vitreal space with a 33-34G needle and syringe. Left eyes were penetrated on the temporal side and right eyes on the nasal side of the pupil. Optical Coherence Tomography (OCT) was performed post injection to assess for any post-operative damage and either buprenorphine (0.01-0.05 mg/ml) or meloxicam (5 mg/ml) was administered to assist in recovery from anaesthesia. Post-procedure either ofloxacin or neyomycin polymyxin B gramicidin was administered to prevent infection. Mice were also administered atipamezole (0.1-1.0 mg/kg) to reverse adverse effects from metabolizing xylazine. The mice were then allowed to recover on heating pads until full consciousness. Mice were monitored post-injection for morbidity and mortality daily for two months. Six mice were used for each of three treatment groups and two control untreated groups (30 mice total). They were sacrificed at three months of age and mice were euthanized via CO2 exposure and eyes were removed first with blunt scissors to cut away the eyelids followed by curved tweezers and 1 mm surgical scissors to separate the optic nerve. The cornea was cut and the lens removed to create the “eye cups” samples for subsequent analysis.

TABLE 7
Mice Cohorts for Intravitreal Injection

| | | | | Dose | Necropsy | |
|---|---|---|---|---|---|---|
| | # of | Dosed | | (vg of | (28 days PI) | |
| | Mice | eyes | Test Article | virus) 1 ul | Frozen | IHC |
| Cohort 1 | 8 | 0 of 16 | None | 0 | 12 eyes | 4 eyes |
| Cohort 2 | 8 | 16 of 16 | AAV204.Opa1_21 | 1.0E+9 | 12 eyes | 4 eyes |
| | | | Low dose | | | |
| Cohort 3 | 8 | 16 of 16 | AAV204.Opa1_21 | 3.0E+9 | 12 eyes | 4 eyes |
| | | | High dose | | | |
| Cohort 4 | 8 | 16 of 16 | AAV204.Opa1_27 | 3.0E+9 | 12 eyes | 4 eyes |

[0298] Upon assaying for Opa1-Flag expression, expression of the Opa1-21 protein at the correct size, in the correct isoform of two bands, was observed in all treated animals (FIG. 10B). The isoform pattern is identical to the endogenous isoform in the untreated and treated wild-type eyes (although the wildtype bands were only visible upon overexposure). The Opa1-27 protein was expressed in the eye samples but not in the predicted isoform size as in cell culture. The expression of Opa1-27 protein seemed to be limited to the un-cleaved long/S1 isoform(s), without the short isoform(s) that may regulate mitochondrial fusion (as described in Wang et al., Mol Biol Cell. 2021 Jan. 15; 32 (2): 157-168). The amount of Brn3a and Rhodopsin (Rho) in the samples were also analyzed using an equivalent protein load (FIG. 10C). Brn3a, the marker for retinal ganglion cells, was more consistent between samples.

[0299] These results show that, compared to the wildtype (WT) animal, all three treatment groups showed a significant increase in the expression of heterologous Opa1, with the construct pA-Opa1-21 high-dose group achieving the most significant Opa1 expression. The Opa1 expression data correlated with the levels of FLAG-tag expression form all three groups with a clear absence for FLAG expression from the untreated samples.

[0300] In addition to Western analysis, RT-PCR was used to analyze the expression level of the RNA transcript. As shown in FIG. 10D, significant expression of RNA transcripts of both pA-Opa1_21 (isoform 1) high and low dose, as well as pA-Opa1_27 (isoform 7), was observed in all treated HT animals, whereas, as expected, transcripts encoding human Opa1 or FLAG-tag were not detected in untreated animals. Interestingly, even though pA-Opa1_27 appeared to be expressing at higher levels on the mRNA level, the protein level was much lower than the high dose of pA-Opa1_21.

[0301] On the other hand, construct pA-Opa1_25 yielded no detectable expression of Opa1 at either mRNA or protein level (data not shown).

[0302] In another proposed study (FIGS. 11A and 11B), Opa1 −/+ mice in each treatment group are dosed with AAV204 viral vector comprising the indicated vector genome. The two control groups are undosed Opa1 −/+ mice and undosed Opa1 +/+ mice, respectively. For the treatment groups delivered with Opa1 transgene without 3×FLAG tag, Opa1 expression level and treatment efficacy are evaluated by RT-qPCR and counting the retinal ganglion cells (RGCs) (FIG. 11A). Visual acuity (VA), Optical Coherence Tomography (OCT), Scotopic Threshold Response (STR), and photopic negative response (PhNR) are measured at 10-month post-injection. In addition, and for the treatment groups delivered with Opa1 transgene containing 3×FLAG tag, Opa1 expression is evaluated using RT-qPCR and IHC at 4-month post injection (FIG. 11B).

### Example 4: In Vitro Characterization of AAV Vector Genomes Comprising Human RS1 Expression Cassette

[0303] Multiple AAV vector genomes were constructed for expression of RS1 protein according to FIG. 12A, with overall design illustrated in FIG. 12B. Each construct comprises, from 5′ to 3′, a promoter, an intron of either CBh-MVM (SEQ ID NO: 200) or MVM (SEQ ID NO: 222), a RS1 open reading frame, a BGH polyA site (SEQ ID NO: 201 or 225), and a telomeric repeat (SEQ ID NO: 203), which are flanked by 5′ and 3′ ITRs. For the promoter, each construct ending in “6” comprises a CBh promoter (SEQ ID NO: 154), each construct ending in “8” comprises a RK promoter (SEQ ID NO: 196), each construct ending in “0” comprises a Rho promoter (SEQ ID NO: 197), and each construct ending in “2” comprises a PDE promoter (SEQ ID NO: 198). Some constructs also contains a betaGlo_s/MAR sequence (SEQ ID NO: 221) between the BGH polyA site and the telomeric repeat.

[0304] The AAV vector genomes used in this study include:
[0305] pA-RS1_8 (comprising SEQ ID NO: 240; generated from a DNA template vector comprising SEQ ID NO: 204);
[0306] pA-RS1_16 (comprising SEQ ID NO: 241; generated from a DNA template vector comprising SEQ ID NO: 205);
[0307] pA-RS1_18 (comprising SEQ ID NO: 242; generated from a DNA template vector comprising SEQ ID NO: 206);
[0308] pA-RS1_20 (comprising SEQ ID NO: 243; generated from a DNA template vector comprising SEQ ID NO: 207);
[0309] pA-RS1_22 (comprising SEQ ID NO: 244; generated from a DNA template vector comprising SEQ ID NO: 208);
[0310] pA-RS1_26 (comprising SEQ ID NO: 245; generated from a DNA template vector comprising SEQ ID NO: 209);
[0311] pA-RS1_28 (comprising SEQ ID NO: 246; generated from a DNA template vector comprising SEQ ID NO: 210);
[0312] pA-RS1_30 (comprising SEQ ID NO: 247; generated from a DNA template vector comprising SEQ ID NO: 211);
[0313] pA-RS1_32 (comprising SEQ ID NO: 248; generated from a DNA template vector comprising SEQ ID NO: 212);
[0314] pA-RS1_36 (comprising SEQ ID NO: 249; generated from a DNA template vector comprising SEQ ID NO: 213);
[0315] pA-RS1_38 (comprising SEQ ID NO: 250; generated from a DNA template vector comprising SEQ ID NO: 214);
[0316] pA-RS1_46 (comprising SEQ ID NO: 251; generated from a DNA template vector comprising SEQ ID NO: 215);
[0317] pA-RS1_48 (comprising SEQ ID NO: 252; generated from a DNA template vector comprising SEQ ID NO: 216); and
[0318] pA-RS1_58 (comprising SEQ ID NO: 224; generated from a DNA template vector comprising SEQ ID NO: 223).

[0319] The RS1 protein expression levels of three AAV vector genomes (pA-RS1_8, pA-RS1_18, and pA-RS1_28) were evaluated using Western analysis (FIG. 13). Both pA-RS1_18 and pA-RS1_28 yielded higher fraction of secreted RS1 protein compared to pA-RS1_8, although the total protein yields were comparable among these constructs.

[0320] Potency of AAV204 viral vector comprising indicated RS1-expressing vector genome was also evaluated in Lec2 cell culture. As shown in FIGS. 14A-14C, myc-tagged RS1 was expressed at levels similar to untagged RS1 in transduced Lec2 cells and was appropriately secreted. And the CBh promoter enabled higher expression of RS1 compared to the RK promoter. The secreted myc-RS1 is about 4 kD larger than native RS1 (FIG. 14D).

### Example 5: In Vivo Study of X-Linked Retinoschisis Treatment Using AAV Viral Vectors Encoding RS1

[0321] In one study, wildtype mice were administered with AAV204 viral vector comprising the RS1 expression cassette via intravitreal injection. The expression of RS1 protein in each animal group was evaluated by RT-qPCR (mRNA copy number/ng of total RNA.) and Western analysis, and the protein distribution by IHC (FIG. 15A), at 1-month time point post injection.

[0322] As shown in FIG. 15B, expression of mouse RS1 (mRS1) protein was detected in each tested mouse, and the mRS1 expression mean values were not statistically different among the test groups. Mice administered with AAV204.pA-RS1_26 exhibits robust expression of myc-tagged human RS1 (hRS1) at a level comparable to natural mRS1 expression. On the other hand, there was little detectable expression of hRS1 from the RK promoter at this time point in mice (with one exception).

[0323] In the next study, the eye cups of wildtype mice were administered with AAV204 viral vector comprising either pA-RS1_36 or pA-RS1_38 vector genome at a dosage of 3e+9 vg/eye via intravitreal injection. At 30-day post-injection, samples were collected, and total protein extract were examined by Western analysis using anti-myc antibody (FIG. 16A). Myc-hRS1 protein expression was detected in all eyes administered with AAV204.pA-RS1_36 (comprising CBh promoter). In contrast, no myc-RS1 protein was detected in the treatment group administered with AAV204.pA-RS1_38 (comprising RK promoter) or in untreated control. This result was confirmed using anti-human RS1 (hRS1) antibody (FIG. 16B). This anti-hRS1 antibody in fact detected both human and mouse RS1 proteins, and the expression pattern of recombinant human RS1 (hRS1) based on anti-hRS1 antibody was consistent with that based on anti-myc antibody.

[0324] To assess ocular expression (FIG. 17A). the eye cups of RS1 (y/−) mice are administered with AAV204 viral vector comprising pA-RS1_26 vector genome. The efficacy of the treatment group is compared with undosed control groups (either RS1 (y/−) mice or wildtype RS1 (y/+) mice) at 6-month time point using optical coherence tomography (OCT) and electroretinogram (ERG), and the expression level of RS1 is evaluated at 7-month time point using IHC.

[0325] In another proof-of-concept study (FIG. 17B), three mice groups are administered with AAV204 viral vector comprising pA-RS1_28, pA-RS1_46, or pA-RS1_48 vector genome, respectively, and compared with the undosed control groups. The expression level of RS1 is evaluated at 3-month time point using Western analysis or RT-qPCR, or at 8-month time point using IHC. The efficacy of the treatment is evaluated at 8-month time point using OCT and ERG.

[0326] In another proof-of-concept study, male RS1 (−/Y) mice and wildtype male siblings were enrolled at 21±3 days of age and acclimated to the study for at least 3 days prior to dosing. The treatment groups were designed according to FIG. 18A. Briefly,
[0327] Groups 5-9 were used to demonstrate the in vivo infectivity of the intravitreally delivered vectors and to analyze the distribution of the viral-derived protein within the retina at 2 months post-treatment (mpt) timepoint. To facilitate protein detection, constructs having a N-term myc tag terminus were used (pA-RS1_46, pA-RS1_48).
[0328] Groups 1-4 were used to confirm expression longevity, as well as to analyze the effect of transgene expression on disease progression, at 6-month timepoint post intravitreal injection. The RS1 transgene used in these vectors did not have the myc tag.
[0329] Groups 10-11 were used to evaluate the effect of sub-retinal injection as an alternative drug delivery procedure, at 6-month timepoint post intravitreal injection, and were directly compared to the IVT injections done in parallel. Subretinal injection for the treatment of retinoschisis may carry more risk, as this is a more invasive technique that could lead to increased rates of retinal detachment given the structurally compromised state of the diseased retina. However, this has not been tested directly. The AAV viral constructs used in these two groups did not contain the myc tag encoding sequence or the S/MAR.
   “Eye cups” were prepared and then the neural retina was separated from the pigmented retinal pigment epithelium (RPE) to create retinal dissection samples.

### Analysis of Retinal Samples 2-Month Post-Intravitreal Delivery

[0330] Using primers directed against mouse RS1 (mRs1), endogenous gene expression was measured across all groups at the 2 mpt endpoint. mRs1 expression was significantly decreased in all mutant animals compared to WT, regardless of treatment (FIG. 18B). This is most likely a result of the degenerative state of the mutant retina, and in particular the loss of photoreceptors, where mRs1 is highly expressed. In the untreated mutant group (group 9), the mutant retina had similarly decreased mRs1 expression, suggesting that treatment did not affect endogenous mRs1 expression.

[0331] Viral-derived RS1 transcripts were then detected and differentiated from endogenous transcripts using primers targeted against the mycRS1 transgene (FIG. 18C). While mycRS1 was undetectable in untreated retinas (groups 8, 9), it was readily detected in all treated retinas (groups 5, 6). The promoter used did not have a significant effect on the total amount of virus-derived transcript. Transgenic myc-RS1 expression was nearly 2 log units lower than that of endogenous Rs1 in mutant animals.

[0332] Both endogenous and viral-derived proteins were detected simultaneously using the RS1-specific monoclonal antibody 3R10 by Western analysis to measure overall RS1 protein expression levels (FIGS. 18D and 18E). While expression varied between individual retinas, mean RS1 protein expression driven by the CBh promoter (group 5) was 30% of the RS1 produced in WT animals (group 8), and that driven by the RK promoter (group 6) was 7% of WT. The difference in the size of the RS1 protein between the treated and WT groups was due to the presence of the myc tag. No RS1 was detected in untreated mutant animals (group 9).

[0333] Immunohistochemical staining of additional eyes at the 2 mpt timepoint using the 3R10 antibody was performed to confirm transgene expression and evaluate protein localization. In addition, lectin PNA was used to label the outer segments of cone photoreceptors, and Iba1 was used to label retinal microglia. Low-magnification images of the entire retina illustrate the extent of transduction, with higher magnification images of the boxed regions to illustrate PNA and Iba1 staining as well as the distribution of RS1 across retinal layers. In some cases, multiple boxes regions are included to allow direct comparison of transduced and non-transduced areas of the same section.

[0334] In WT animals from group 8, Rs1 localized prominently to the inner segments of photoreceptors, as well as more diffusely to the synaptic layers of the retina. Cone photoreceptors were regularly spaced through the length of the retina (12.2±1.5 cones per 100 μm), and Iba1 staining was minimal (FIG. 19A). In contrast, untreated mutant retinas (group 9) had no detectable RS1 staining, the cone density decreased (7.8±0.9 cones per 100 μm), and Iba1 staining was more prominent, indicating a hyperinflammatory state that is common in retinal diseases (FIG. 19B). Small, bright foci that appeared with RS1 staining in retinas that did not express RS1 were IgG-containing retinal blood vessels that became labeled with the anti-mouse IgG secondary antibody in the absence of RS1 expression. Several examples of these are indicated with arrows in FIG. 19B.

[0335] RS1 labeling in mutant retinas treated with AAV204.CBh:RS1_46 (group 5) was generally confined to the inner nuclear layer (INL), with small accompanying spots of labeled photoreceptor inner segments. There were no examples of labeled photoreceptors without adjacent inner retinal labeling. Cone density and Iba1 labeling were similar to that of untreated retinas, regardless of RS1 expression. A representative retina from this treatment group is shown in FIG. 19C. Arrows indicate small areas of transgene expression in photoreceptors. The right eye from one of the animals (#123) was exceptional in that transgene expression was observed along 58% of the retina, including the entire dorsal half, in both the inner retina as well as in photoreceptors (FIG. 19D); however, there were still no obvious changes to cone density or Iba1 labeling in this eye sample.

[0336] In contrast, none of the animals treated with AAV204.RK:RS1_48 (group 6) had observable RS1 immunolabeling (FIG. 19E). Cone density and Iba1 labeling in these animals was indistinguishable from untreated mutants. This was unexpected given that viral expression was detected by RT-PCR and Western analysis from other animals in this group.

[0337] Cone density was then quantified from IHC images of WT and untreated mutant animals, as well as the right eye from animal #123, which had a high level of transgene expression in photoreceptors. Cone density in mutant eyes was reduced to 63% of that in WT animals, as expected (FIG. 19F). Cone density was also measured in the well-defined RS1-positive and RS1-negative regions of eye #123OD (group 5). The entirety of this eye had lower cone density than the WT average, but there was a modest improvement in the RS1-positive area of that eye when compared with the RS1-negative area from the same eye.

### Analysis of Retinal Samples 6-Month Post-Intravitreal Delivery

[0338] To demonstrate the extent of transduction in IVT-injected eyes, the retinas from one animal treated with AAV204.RK:RS1_28 (group 2) were stained as flat mounts (FIG. 19G). Transgene expression was restricted to a well-defined area in the periphery, covering about 10% of the entire retina. The extent of transduction was similar in the fellow eye. The cone density in a non-transduced part of the retina was about 19% of that in a similarly prepared WT control. In the transduced part of the retina, cone density was improved to 46% of WT. The results showed that expression of the RS1 transgene was more limited than expected and concentrated near the injection site in the dorsal retina.

[0339] Western analysis was performed on retinas harvested at the 6 mpt timepoint (FIGS. 20A and 20B). Using the RS1-specific antibody 3R10, RS1 expression was detected in mutant eyes treated with either AAV204.CBh:RS1_28 (group 2) or AAV204.RK:RS1_26 (group 4). Among all treated animals, the level of RS1 expression ranged from 1.5% to 5.5% of that detected in WT retinas. Unexpectedly, expression from the CBh promoter-controlled transgene was not significantly higher than that from the RK promoter-controlled transgene. No expression was detected in untreated mutant animals.

[0340] Immunohistochemistry (IHC) was then used to examine the distribution of RS1 expression in treated eyes at this timepoint and to determine the effect of RS1 expression on the disease phenotype. Similar to the previous 2 mpt timepoint, RS1 expression in WT animals was concentrated in photoreceptor inner segments with more diffuse expression in the inner retina (FIG. 20C). In contrast, no expression was seen in untreated mutant animals (FIG. 20D). Labeling of blood vessels with the anti-mouse secondary antibody was seen again in the mutant retinas (FIG. 20D, examples indicated with arrows). Cone density was likewise reduced in the mutants at this timepoint, and Iba1 labeling was more prominent.

[0341] In animals from group 2 treated with AAV204.RK:RS1_28 that had detectable RS1 expression, it ranged from 14% to 59% of the section. This should not be construed as a percentage of the entire retina, as only the sections with maximal expression were imaged. A representative example of this group is shown in FIG. 20E. RS1 labeling was not restricted primarily to the inner retina, but most transduced areas included considerable photoreceptor expression as well. In contrast, none of the group 4 eyes treated with AAV204.CBh:RS1_26 had detectable expression (FIG. 20F).

[0342] Notably, the localization of recombinant RS1 in the retina of group 2 animals was identical to that of the endogenous protein, with a significant amount of staining in photoreceptor inner segments and more diffuse staining throughout the inner retina, even in animals treated with a photoreceptor-specific promoter. This indicates that secreted RS1 is capable of radial diffusion through the retina to reach receptors in adjacent layers.

[0343] Cone density was quantified in all animals at the 6-month timepoint (FIG. 21). In mutants treated with AAV204.RK:RS1_28 (group 2), the RS1-positive and RS1-negative regions were treated as separate data points. Cone density in untreated mutants was 31±6% of wild-type, and the mean density in group 2 was unchanged, regardless of RS1 expression. However, in all but one of the group 2 animals, the cone density was higher in the RS1-positive region compared to the adjacent RS1-negative region in the same section. This improvement ranged from 15% to 71%. Surprisingly, group 4 animals treated with AAV204CBh:RS1_26 had a mean cone density that was 63% greater than the untreated group (p=0.0217), despite having no observable RS1 expression. Thus, cone density was improved after treatment with either viral construct, despite that in the case of RK-promoter controlled RS1 such improvement was not correlated with observable RS1 immunoreactivity.

[0344] Optical coherence tomography (OCT) was then used to analyze the retinal status. OCT is a noninvasive imaging technique that generates cross-sectional images of the retina and is regularly used to aid in the diagnosis of retinal diseases. This is a particularly useful technique for retinoschisis, as the large retinal cavities that are characteristic of the disease are easily observed. However, by 7 months of age most of the schises are resolved in RS1 mutant mice. OCT images are similar to histological sections, but they are more limited in that they cannot be directly correlated with expression data. Therefore, interpretation of these images must include the assumption that expression of the transgene is widespread, or at least that it overlaps with the OCT field.

[0345] Analysis of the OCT data from this study revealed that the schisis phenotype was apparent only in about one third of the imaged mutant eyes, regardless of treatment. This is consistent with that feature of the disease beginning to resolve around this timepoint in mutant mice. No schises were observed in WT eyes.

[0346] Representative OCT images are shown in FIG. 22A, including the two treated eyes from Group 2 in which maximal RS1 expression was observed by either IHC or Western analysis. Each image is of the dorsal retina, in the mid-periphery. In 10OD, this is approximately the area in which strong RS1 expression was observed by IHC. Untreated mutant eyes from group 1 had a significantly thinner Outer Nuclear Layer (ONL) than WT eyes from group 3 (26.9±1.9 μm vs. 52.8±2.6 μm). Eyes from both treatment groups had a thicker ONL than the untreated animals, but they remained thinner than WT eyes (FIG. 22B).

[0347] The current study was completed using isolated retinas instead of whole eyes. Isolating the retina has the effect of concentrating the target tissue within the sample and making the limited amount of expression from the RK promoter visible. Furthermore, using isolated retina excludes the extra-retinal expression that occurs with the ubiquitous CBh promoter, providing a clear indication of the RS1 expression level in the target tissue. The results show that (i) RS1 expression from either promoter was readily detectable in treated mutant eyes, regardless of the promoter used; and (ii) unexpectedly, the CBh-driven RS1 expression in the retina at 2 months post-treatment is nearly 1.5 log units lower than that of endogenous RS1.

### Analysis of Retinal Samples 6-Month Post-Sub-Retinal Delivery

[0348] In addition to intravitreal injection, selected AAV viral vectors were also delivered by sub-retinal injection (groups 10 and 11 in FIG. 18A). The corresponding samples were analyzed together with samples from the control groups 1 and 3 (untreated mutant, and wildtype, respectively), at 6 mpt timepoint.

[0349] The RS1-specific monoclonal antibody 3R10 was used to confirm transgene expression and evaluate protein localization. In addition, lectin PNA was used to label the outer segments of cone photoreceptors, and Iba1 was used to label retinal microglia. Low-magnification images of the entire retina are shown to illustrate the extent of transduction, with higher magnification images of the boxed regions to illustrate PNA and Iba1 staining as well as the distribution of RS1 across retinal layers. In some cases, multiple boxes regions are included to allow direct comparison of transduced and non-transduced areas of the same section.

[0350] In WT animals from group 3, endogenous Rs1 localizes prominently to the inner segments of photoreceptors, as well as more diffusely to the synaptic layers of the retina. Cone photoreceptors are regularly spaced through the length of the retina (10.2±1.6 cones per 100 μm), and Iba1 staining is minimal (FIG. 23A).

[0351] In contrast, untreated mutant retinas (group 1) had no detectable RS1 staining, the cone density decreased (3.2±0.6 cones per 100 μm), and Iba1 staining was more prominent, indicating a hyperinflammatory state that is common in retinal diseases (FIG. 23B). Small, bright foci that appear with RS1 staining in retinas that do not express RS1 are IgG-containing retinal blood vessels that become labeled with the anti-mouse IgG secondary antibody in the absence of RS1 expression. Several examples of these are indicated with arrows in FIG. 23B.

[0352] Mutant animals treated with AAV204.CBh:RS1_16 (group 10) exhibited severe retinal degeneration associated with the injection site, with no remaining retinal cells (FIG. 23C). In some cases, there were adjacent sections of retina with RS1 expression, although cone density in these RS1+ areas was not improved. However, the mean cone density in the RS1-areas of these retinas, which did not suffer injection-related degeneration, was approximately double that of untreated animals (6.2±1.4 vs. 3.2±0.6 cones per 100 μm, respectively), suggesting that RS1 expression below the level of IHC detectability may extend beyond the bleb and still provide some therapeutic benefit. No change was seen in Iba1 staining of treated animals. The right eye from one animal (#167) was unique in that it had a major lesion in the ventral retina, most likely a mechanical injury sustained during injection. Despite that, uniform RS1 staining was seen throughout the inner retina, as well as in photoreceptors adjacent to the lesion (FIG. 23D). It is likely that this lesion compromised physical barriers that normally inhibit the diffusion of viral particles through the retina, permitting more widespread expression.

[0353] In contrast, seven of eight eyes treated with AAV204.RK:RS1_18 (group 11, FIG. 23E) had very significant RS1 expression in photoreceptors, and only one of those seven animals had the severe degeneration that was common in animals treated with CBh:RS1. Expression was generally localized to the dorsal retina at the bleb. The RK promoter is rod-specific, but labeling was also observed in the inner retina adjacent to the RS1+ photoreceptors in all seven eyes, indicating that RS1 produced in the outer retina can diffuse radially. In four of the seven eyes, a cone-depleted area was associated with the central bleb, although the rest of the retina was intact. Outside of this cone-depleted area, there was an RS1-positive margin in which the cone density was actually increased compared to the RS1-negative part of the same section. In fact, this marginal area had a cone density that was equivalent to a wild-type eye. Taken together, these results suggest that extreme overexpression of RS1 in mutant animals may be severely retinotoxic and that moderate overexpression is detrimental to cones, but that appropriate dosing can yield therapeutic results.

[0354] The chart in FIG. 23F summarizes the cone density measurements. Areas of severe degeneration were omitted. For group 11 eyes treated with RK:RS1, the cone-depleted RS1-positive zone was omitted. Group 11 RS1+ is therefore representative of the cone-enriched area surrounding the depleted zone. All treated eyes had a higher cone density than untreated control eyes, even in areas lacking visible RS1 expression. Furthermore, the cone-enriched, RS1-positive area in group 11 is indistinguishable from WT

[0355] The thickness of the outer nuclear layer (ONL) was also measured from DAPI-stained frozen sections (FIGS. 24A-24C). For this analysis, areas of severe degeneration were omitted. In group 10 animals treated with CBh:RS1, ONL thickness was equal to untreated mutant animals. In all group 11 animals treated with RK:RS1, the ONL was thicker specifically in areas of the retina with RS1 expression. In areas of those eyes that did not express RS1, the ONL thickness was roughly equal to that of untreated mutants.

[0356] Protein Analysis: Western analysis was performed on frozen tissue harvested 6 months post-treatment (FIGS. 25A and 25B). Using the RS1-specific antibody 3E10, RS1 expression was detected in mutant eyes treated with either AAV204.CBh:RS1_16 (group 10) or AAV204.RK:RS1_18 (group 11). Expression of recombinant RS1 in both groups was statistically equal to that of endogenous RS1 expression in WT animals (group 3).

[0357] Optical coherence tomography (OCT): as mentioned above, interpretation of OCT images assumes that expression of the transgene is widespread, or at least that it overlaps with the OCT field. This is reasonable in this study because the injections were done subretinally, and the survey of IHC images from animals treated with RK:RS1_18 (group 11) suggests that expression was widespread through the dorsal retina and excluded from the ventral side.

[0358] OCT data are shown in FIGS. 26A-26F. The ONL of untreated mutant eyes was nearly one-third that of wild-type eyes (17.9±1.9 vs 48.7±1.9 μm, FIGS. 26A-26B). All treated eyes were imaged immediately after injection to confirm the presence of a bleb (FIG. 26C). All 13 eyes successfully injected with CBh:RS1_16 showed severe degeneration (FIG. 26D). Several examples overlapped with the margin of the bleb in which some retina remained, but the ONL thickness there as well as that of the ventral, untreated retina was not significantly different from uninjected mutant animals.

[0359] In contrast, among the eyes treated with RK:RS1_18 (group 11), only seven of the 13 eyes with interpretable images had signs of severe injection-associated degeneration, but four of the seven still had measurable areas in the margin of the bleb (FIG. 26E-26F). Among the six non-degenerated eyes and the four degenerated eyes with measurable margins, all of them showed improvement in the ONL thickness when compared with the corresponding ventral retina as well as the untreated mutant eyes from Group 1 (FIG. 26G-26H).

[0360] Electroretinography (ERG): Electroretinography is a non-invasive technique that measures retinal function in response to a light flash, and it can be modified to elicit either rod- or cone-based responses. The intensity of the flash stimulus can be varied as well, and the amplitude of the ERG components will respond in parallel. The dark-adapted (DA) ERG elicits a rod dominated response and is comprised of two main components: the a-wave, which is the initial negative amplitude peak and reflects rod photoreceptor activity; and the b-wave, which is a large positive amplitude peak and primarily reflects the activity of ON-bipolar cells. In light-adapted (LA) ERGs, a dim background light is used to desensitize the rod photoreceptors, allowing the cone response to be isolated. Cone responses can also be measured using a flicker paradigm, where the frequency of the stimulus is faster than the recovery time of rod photoreceptors. More description of ERG can be found, for example, in Georgiou, Anne L., et al., Current eye research 39.5 (2014): 472-486, the content of which is incorporated by reference herein in its entirety.

[0361] The ERG protocol used in this study utilizes a full-field stimulus, so the recordings reflect the net response across the entire visual field. The ability to resolve the effects of a rAAV-based treatment on the ERG is therefore dependent on the extent of transgene expression across the retina.

[0362] In early stages of retinoschisis disease, the synapses between photoreceptors and inner retinal neurons are disrupted. In a DA ERG, this manifests initially as a reduction in b-wave amplitude. As the disease progresses, photoreceptors are lost, and the a-wave amplitude decreases as a result. In severe cases the ERG response can be undetectable.

[0363] A summary of the ERG results is presented in Table 8. While no improvement was seen in treated animals after single-flash stimuli, flicker ERGs indicated a significant improvement in cone responses in group 11 animals treated with RK:RS1_18. Representative flicker ERG traces are shown in FIG. 27.

TABLE 8
ERG Results Matrix

| | | Group 1 | Group 3 | Group 10 | Group 11 |
|---|---|---|---|---|---|
| | | Genotype: | | | |
| | | Rs1^{-/Y} | WT | Rs1^{-/Y} | Rs1^{-/Y} |
| | | Treatment: | | | |
| | | — | — | CBh:RS1_16 | RK:RS1_18 |
| DA 0.01 | a-wave IT (ms) | n/a | | | |
| | a-wave amp (μV) | | | | |
| | b-wave IT (ms) | 85.1 ± 8.8 | 86.6 ± 4.3 | 82.8 ± 10.3 | 77.7 ± 12.4 |
| | b-wave amp (μV) | 140.3 ± 40.3 | 372 ± 76.1 | 105.7 ± 61.5 | 145.7 ± 76.7 |
| DA 3.0 | a-wave IT (ms) | 25.1 ± 5.7 | 19.2 ± 0.8 | 26.6 ± 4.3 | 19.5 ± 3.5 |
| | a-wave amp (μV) | 93.5 ± 19.1 | 239.8 ± 46.7 | 37.6 ± 32.2 | 86.4 ± 51 |
| | b-wave IT (ms) | 67.6 ± 10.3 | 70.1 ± 4.1 | 71.3 ± 14 | 69.5 ± 13.3 |
| | b-wave amp (μV) | 206.8 ± 49.8 | 560.4 ± 100 | 128.8 ± 52.7 | 229.2 ± 72 |
| | b/a ratio | 2.3 ± 0.5 | 2.3 ± 0.1 | 5.7 ± 5.1 | 3.5 ± 2.3 |
| LA 6.0 | a-wave IT (ms) | n/a | | | |
| | a-wave amp (μV) | | | | |
| | b-wave IT (ms) | 67.2 ± 22.8 | 46 ± 2.1 | 79.8 ± 22.9 | 53.4 ± 12.2 |
| | b-wave amp (μV) | 60.2 ± 70.1 | 148.8 ± 21.3 | 63.9 ± 29.3 | 76 ± 31.6 |
| 10 Hz | time to peak (ms) | 53.1 ± 6.7 | 43.5 ± 3.1 | 47.4 ± 11 | 48.3 ± 5.2 |
| flicker | T-P amp (μV) | 22 ± 9 | 87.4 ± 14.9 | 17.9 ± 7.4 | 37.1 ± 20.3 |
| 15 Hz | time to peak (ms) | 56.3 ± 6.5 | 39.6 ± 2.3 | 45.4 ± 13.3 | 48.6 ± 6.8 |
| flicker | T-P amp (μV) | 15.5 ± 5.3 | 69.1 ± 10.9 | 16 ± 12.3 | 29.5 ± 14.8 |

Summary of ERG results at the 6-month timepoint. All values are mean ± SD. IT = implicit time; T-P = trough-to-peak.

### Summary of Results

[0364] Results of the sub-retinal injection show that RS1 expression from AAV204.CBh:RS1_16 at the dose used in this study may result in certain toxicity, such as possible retinal degeneration at the injection site. CBh is a strong, ubiquitous promoter. It is possible that overexpression of RS1 in cells that do not normally express it may be the cause of the degeneration, suggesting that a lower dose may be used for delivery of RS1 transgene that is operably linked to a strong, ubiquitous promoter. In contrast, only about half of the eyes that were treated with AAV204.RK:RS1_18 had similar areas of degeneration. RK is a photoreceptor-specific promoter, which is the primary site of RS1 expression in the WT retina. Although Western analysis showed that the two promoters yielded equal amounts of recombinant protein, the exclusion of RS1 expression in non-photoreceptors was clearly beneficial. Even with RK-driven, photoreceptor-specific expression, secreted RS1 was observed in the inner retina adjacent to RS1-positive photoreceptors, indicating that it was capable of diffusing radially through the retina. This expression pattern closely matches that of endogenous RS1 expression in WT animals. Notably, Western analysis showed RS1 expression in treated eyes equal to that of endogenous expression in WT mice, even though only a fraction of the retina was treated, indicating that (i) the load of RS1 protein in the treated areas is likely to be significantly above the physiological level, and (ii) the degeneration associated with the RK promoter is likely to be resolved by using lower doses.

[0365] Because RS1 mutations cause severe structural damage to the retina, this study was initially designed for intravitreal injection, which is a less invasive technique than subretinal, and the intent was to minimize the risk of causing additional damage to an already compromised retina. However, animals treated intravitreally with AAV204.CBh:RS1_26 and AAV204.RK:RS1_28 had minimal expression of recombinant protein, which promoted the study with subretinal treatment. With subretinal delivery, the vector is restricted to a much smaller space immediately adjacent to the target layer, thereby increasing the transduction rate and boosting transgene expression. Indeed, comparison of these two studies demonstrates that subretinal injection yields superior expression to intravitreal.

[0366] Efficacy in this study was evaluated via three different measurements: cone density, ONL thickness, and ERG, all of which were decreased in untreated mutant mice. RS1 Expression from the CBh promoter caused catastrophic retinal degeneration in all treated animals. The RK promoter, with an expression profile targeted to the desired cell type, was much better tolerated, and the corresponding treated eyes had more cones, a thicker ONL, and an improved ERG cone response versus untreated animals. Degenerated areas were still observed in some RK-treated eyes, but these areas were still directly associated with the injection site. The margins of the degenerated areas, where the effective dose was presumably lower, showed improvement in both cone density and ONL thickness. Surprisingly, IHC analysis showed that the cone density was slightly, but significantly, improved in areas of treated eyes in which RS1 immunoreactivity was not detected. This was true for both CBh- and RK-treated eyes, and supports the hypothesis that low doses, even below the threshold of immunodetectability, could still be cone-protective.

[0367] In view of the encouraging results from subretinal delivery, para-retinal administration could be a preferred vector delivery method for treating XLRS. Similar to intravitreal injection and unlike subretinal injection, para-retinal injection does not penetrate the retina and thus is less likely than sub-retinal injection to cause mechanical damages to the retina, which is usually fragile in XLRS cases. On the other hand, para-retina injection is superior than intravitreal injection by localizing the injection bolus immediately adjacent to the retina. Prior studies in NHP models using an AAV204.CBh:GFP vector demonstrated that this technique allows the efficient transduction of all retinal layers. While the mouse eye is too small to achieve para-retinal delivery, the results of subretinal injections in the current mice study nonetheless model efficacy for para-retinal injection in non-human primates (NHP) and human.

### FURTHER NUMBERED EMBODIMENTS

[0368] Further numbered embodiments of the present disclosure are provided as follows:

[0369] Embodiment 1. A method of treating retinoschisis in a subject in need thereof, comprising para-retinal or sub-retinal administration of an AAV viral vector to the subject.

[0370] Embodiment 2. The method of Embodiment 1, wherein the AAV viral vector comprises a photoreceptor-specific promoter operably linked to a transgene encoded by a heterologous nucleic acid.

[0371] Embodiment 3. The method of Embodiment 2, wherein the photoreceptor-specific promoter is selected from the group consisting of a rhodopsin kinase (RK) promoter, a rhodopsin (RHO) promoter, a beta phosphodiesterase (PDE) promoter, and a retinitis pigmentosa (RP1) promoter.

[0372] Embodiment 4. The method of Embodiment 2, wherein the photoreceptor-specific promoter is a rhodopsin kinase (RK) promoter.

[0373] Embodiment 5. The method of Embodiment 4, wherein the RK promoter comprises, consists essentially of, or consists of a nucleic acid sequence having at least 90%, at least 95%, at least 97%, at least 98%, at least 99%, or 100% identity to SEQ ID NO: 196.

[0374] Embodiment 6. The method of any one of Embodiments 1-5, comprising para-retinal administration of the AAV viral vector to the subject.

[0375] Embodiment 7. The method of any one of Embodiments 1-6, wherein the subject is a human, and wherein the AAV viral vector is administered at a dose of about 1010 to about 1012 viral genome (vg).

[0376] Embodiment 8. The method of any one of Embodiments 1-6, wherein the retinoschisis is X-linked retinoschisis.

[0377] Embodiment 9. The method of any one of Embodiments 2-8, wherein the transgene is RS1.

[0378] Embodiment 10. The method of Embodiment 9, wherein the transgene comprises a nucleic acid sequence having at least 90%, at least 95%, at least 97%, at least 98%, at least 99%, or 100% identity to SEQ ID NO: 117, or wherein the transgene encodes an amino acid sequence having at least 90%, at least 95%, at least 97%, at least 98%, at least 99%, or 100% identity to SEQ ID NO: 143.

[0379] Embodiment 11. A method of treating an ocular disease or disorder in a subject in need thereof, comprising administration of an AAV viral vector to the subject, wherein the AAV viral vector comprises an AAV vector genome, wherein the AAV vector genome comprises, in 5′ to 3′ orientation:
[0380] (a) a first AAV inverted terminal repeat,
[0381] (b) a promoter,
[0382] (c) a heterologous nucleic acid encoding Opa1,
[0383] (d) a polyadenylation signal, and
[0384] (e) a second AAV inverted terminal repeat.

[0385] Embodiment 12. The method of Embodiment 11, wherein the promoter is a CBh promoter comprising a sequence having at least 90%, at least 95%, at least 97%, at least 98%, at least 99%, or 100% identity to SEQ ID NO: 154.

[0386] Embodiment 13. The method of Embodiment 11, wherein the promoter is a MeCP2 promoter comprising a sequence having at least 90%, at least 95%, at least 97%, at least 98%, at least 99%, or 100% identity to SEQ ID NO: 156.

[0387] Embodiment 14. The method of any one of Embodiments 11-13, wherein the AAV vector genome comprises an intron sequence having at least 90%, at least 95%, at least 97%, at least 98%, at least 99%, or 100% identity to SEQ ID NO: 200 or 227, and wherein the intron sequence is located between the promoter and the heterologous nucleic acid encoding Opa1.

[0388] Embodiment 15. The method of Embodiment 14, wherein the intron sequence is located immediately downstream of the promoter, without any additional nucleotide in between.

[0389] Embodiment 16. The method of any one of Embodiments 11-15, wherein the heterologous nucleic acid encoding Opa1 comprises a sequence having at least 90%, at least 95%, at least 97%, at least 98%, at least 99%, or 100% identity to any one of SEQ ID NO: 175, 182 and 184.

[0390] Embodiment 17. The method of any one of Embodiments 11-16, wherein the heterologous nucleic acid encodes an Opa1 protein comprising an amino acid sequence having at least 90%, at least 95%, at least 97%, at least 98%, at least 99%, or 100% identity to any one of SEQ ID NO: 180, 183 and 185.

[0391] Embodiment 18. The method of any one of Embodiments 11-16, wherein the heterologous nucleic acid encodes an Opa1 protein comprising an amino acid sequence having at least 90%, at least 95%, at least 97%, at least 98%, at least 99%, or 100% identity to SEQ ID NO: 180.

[0392] Embodiment 19. The method of any one of Embodiments 11-18, wherein the polyadenylation signal comprises a sequence having at least 90%, at least 95%, at least 97%, at least 98%, at least 99%, or 100% identity to SEQ ID NO: 201 or 225.

[0393] Embodiment 20. The method of any one of Embodiments 11-19, wherein the AAV vector genome does not comprise any telomeric repeats sequence.

[0394] Embodiment 21. The method of any one of Embodiments 11-19, wherein the AAV vector genome comprises a first telomeric repeats sequence located between the polyadenylation signal and the second AAV inverted terminal repeat, and wherein the first telomeric repeats sequence has at least 90%, at least 95%, at least 97%, at least 98%, at least 99%, or 100% identity to SEQ ID NO: 202.

[0395] Embodiment 22. The method of any one of Embodiments 11-21, wherein the AAV vector genome comprises a second telomeric repeats sequence located between the first AAV inverted terminal repeat and the promoter, and wherein the second telomeric repeats sequence has at least 90%, at least 95%, at least 97%, at least 98%, at least 99%, or 100% identity to SEQ ID NO: 203.

[0396] Embodiment 23. The method of any one of Embodiments 11-22, wherein the first AAV inverted terminal repeat comprises or consists of a sequence having at least 90%, at least 95%, at least 97%, at least 98%, at least 99%, or 100% identity to SEQ ID NO: 253, and/or wherein the second AAV inverted terminal repeat comprises or consists of a sequence having at least 90%, at least 95%, at least 97%, at least 98%, at least 99%, or 100% identity to SEQ ID NO: 254.

[0397] Embodiment 24. The method of any one of Embodiments 11-23, wherein the AAV vector genome comprises, in 5′ to 3′ orientation:
[0398] (a) the first AAV inverted terminal repeat,
[0399] (b) the promoter comprising a sequence having at least 90%, at least 95%, at least 97%, at least 98%, at least 99%, or 100% identity to SEQ ID NO: 154,
[0400] (c) the heterologous nucleic acid encoding Opa1,
[0401] (d) the polyadenylation signal comprises a sequence having at least 90%, at least 95%, at least 97%, at least 98%, at least 99%, or 100% identity to SEQ ID NO: 201, and
[0402] (e) the second AAV inverted terminal repeat.

[0403] Embodiment 25. The method of Embodiment 24, wherein the AAV vector genome comprises an intron sequence having at least 90%, at least 95%, at least 97%, at least 98%, at least 99%, or 100% identity to SEQ ID NO: 200, and wherein the intron sequence is located between the promoter and the heterologous nucleic acid encoding Opa1.

[0404] Embodiment 26. The method of Embodiment 24 or 25, wherein the AAV vector genome comprises a sequence having at least 90%, at least 95%, at least 97%, at least 98%, at least 99%, or 100% identity to SEQ ID NO: 228.

[0405] Embodiment 27. The method of any one of Embodiments 24-26, wherein the Opa1 protein comprises an amino acid sequence having at least 90%, at least 95%, at least 97%, at least 98%, at least 99%, or 100% identity to SEQ ID NO: 180.

[0406] Embodiment 28. The method of any one of Embodiments 11-27, wherein the AAV vector genome comprises a polynucleotide sequence having at least 90%, at least 95%, at least 97%, at least 98%, at least 99%, or 100% identity to any one of SEQ ID NO: 230-239.

[0407] Embodiment 29. The method of any one of Embodiments 11-28, wherein the ocular disease or disorder is Autosomal Dominant Optic Atrophy.

[0408] Embodiment 30. A method of treating an ocular disease or disorder in a subject in need thereof, comprising administration of an AAV viral vector to the subject, wherein the AAV viral vector comprises an AAV vector genome, wherein the AAV vector genome comprises, in 5′ to 3′ orientation:
[0409] (a) a first AAV inverted terminal repeat,
[0410] (b) a promoter,
[0411] (c) a heterologous nucleic acid encoding RS1,
[0412] (d) a polyadenylation signal, and
[0413] (e) a second AAV inverted terminal repeat.

[0414] Embodiment 31. The method of Embodiment 30, wherein the promoter is a photoreceptor-specific promoter.

[0415] Embodiment 32. The method of Embodiment 31, wherein the photoreceptor-specific promoter is selected from the group consisting of a rhodopsin kinase (RK) promoter, a rhodopsin (Rho) promoter, a beta phosphodiesterase (PDE) promoter, and a retinitis pigmentosa (RP1) promoter.

[0416] Embodiment 33. The method of Embodiment 30, wherein the promoter is a CBh promoter comprising a sequence having at least 90%, at least 95%, at least 97%, at least 98%, at least 99%, or 100% identity to SEQ ID NO: 154.

[0417] Embodiment 34. The method of Embodiment 30, wherein the promoter is a RK promoter comprising a sequence having at least 90%, at least 95%, at least 97%, at least 98%, at least 99%, or 100% identity to SEQ ID NO: 196.

[0418] Embodiment 35. The method of Embodiment 30, wherein the promoter is a Rho promoter comprising a sequence having at least 90%, at least 95%, at least 97%, at least 98%, at least 99%, or 100% identity to SEQ ID NO: 197.

[0419] Embodiment 36. The method of Embodiment 30, wherein the promoter is a PDE promoter comprising a sequence having at least 90%, at least 95%, at least 97%, at least 98%, at least 99%, or 100% identity to SEQ ID NO: 198.

[0420] Embodiment 37. The method of any one of Embodiments 30-36, wherein the AAV vector genome comprises an IRBP enhancer sequence upstream of the promoter, wherein the IRBP enhancer sequence has at least 90%, at least 95%, at least 97%, at least 98%, at least 99%, or 100% identity to SEQ ID NO: 199.

[0421] Embodiment 38. The method of Embodiment 37, wherein the IRBP enhancer sequence is located immediately upstream of the promoter, without any additional nucleotide in between.

[0422] Embodiment 39. The method of any one of Embodiments 30-38, wherein the AAV vector genome comprises a CVA-MVM intron sequence having at least 90%, at least 95%, at least 97%, at least 98%, at least 99%, or 100% identity to SEQ ID NO: 226, and wherein the CVA-MVM intron sequence is located between the promoter and the heterologous nucleic acid encoding RS1.

[0423] Embodiment 40. The method of any one of Embodiments 30-38, wherein the AAV vector genome comprises an intron sequence having at least 90%, at least 95%, at least 97%, at least 98%, at least 99%, or 100% identity to SEQ ID NO: 200 or 222, and wherein the intron is located between the promoter and the heterologous nucleic acid encoding RS1.

[0424] Embodiment 41. The method of any one of Embodiments 30-40, wherein the heterologous nucleic acid encoding RS1 comprises a sequence having at least 90%, at least 95%, at least 97%, at least 98%, at least 99%, or 100% identity to SEQ ID NO: 117.

[0425] Embodiment 42. The method of any one of Embodiments 30-41, wherein the heterologous nucleic acid encodes an RS1 protein comprising an amino acid sequence having at least 90%, at least 95%, at least 97%, at least 98%, at least 99%, or 100% identity to SEQ ID NO: 143.

[0426] Embodiment 43. The method of any one of Embodiments 30-42, wherein the polyadenylation signal comprises a sequence having at least 90%, at least 95%, at least 97%, at least 98%, at least 99%, or 100% identity to SEQ ID NO: 201 or 225.

[0427] Embodiment 44. The method of any one of Embodiments 30-43, wherein the AAV vector genome does not comprise any telomeric repeats sequence.

[0428] Embodiment 45. The method of any one of Embodiments 30-43, wherein the AAV vector genome comprises a first telomeric repeats sequence located between the polyadenylation signal and the second AAV inverted terminal repeat, and wherein the first telomeric repeats sequence has at least 90%, at least 95%, at least 97%, at least 98%, at least 99%, or 100% identity to SEQ ID NO: 203.

[0429] Embodiment 46. The method of any one of Embodiments 30-45, wherein the AAV vector genome comprises a human beta-globin scaffold/matrix attachment region (βGlo_s/MAR) sequence located between the polyadenylation signal and the second AAV inverted terminal repeat, or the polyadenylation signal and the first telomeric repeats sequence, wherein the βGlo_s/MAR has at least 90%, at least 95%, at least 97%, at least 98%, at least 99%, or 100% identity to SEQ ID NO: 221.

[0430] Embodiment 47. The method of any one of Embodiments 30-46, wherein the first AAV inverted terminal repeat comprises or consists of a sequence having at least 90%, at least 95%, at least 97%, at least 98%, at least 99%, or 100% identity to SEQ ID NO: 255, and/or wherein the second AAV inverted terminal repeat comprises or consists of a sequence having at least 90%, at least 95%, at least 97%, at least 98%, at least 99%, or 100% identity to SEQ ID NO: 256.

[0431] Embodiment 48. The method of any one of Embodiments 30-47, wherein the AAV vector genome comprises, in 5′ to 3′ orientation:
[0432] (a) the first AAV inverted terminal repeat,
[0433] (b) the IRBP enhancer sequence having at least 90%, at least 95%, at least 97%, at least 98%, at least 99%, or 100% identity to SEQ ID NO: 199,
[0434] (c) the RK promoter comprising a sequence having at least 90%, at least 95%, at least 97%, at least 98%, at least 99%, or 100% identity to SEQ ID NO: 196,
[0435] (d) the heterologous nucleic acid encoding RS1,
[0436] (e) the polyadenylation signal comprising a sequence having at least 90%, at least 95%, at least 97%, at least 98%, at least 99%, or 100% identity to SEQ ID NO: 225, and
[0437] (f) the second AAV inverted terminal repeat.

[0438] Embodiment 49. The method of any one of Embodiments 30-48, wherein the AAV vector genome comprises an intron sequence having at least 90%, at least 95%, at least 97%, at least 98%, at least 99%, or 100% identity to SEQ ID NO: 222, and wherein the intron sequence is located between the promoter and the heterologous nucleic acid encoding RS1.

[0439] Embodiment 50. The method of Embodiment 49, wherein the AAV vector genome comprises a CBA sequence of SEQ ID NO: 229, or a sequence having at most 5, at most 4, at most 3, at most 2, or at most 1 mutation(s) thereto, and wherein the CBA sequence is located immediately upstream of the intron sequence without any additional nucleotides in between.

[0440] Embodiment 51. The method of Embodiment 49 or 50, wherein the AAV vector genome comprises a CBA-MVM intron sequence having at least 90%, at least 95%, at least 97%, at least 98%, at least 99%, or 100% identity to SEQ ID NO: 226, and wherein the CVA-MVM intron sequence is located between the promoter and the heterologous nucleic acid encoding RS1.

[0441] Embodiment 52. The method of any one of Embodiments 48-51, wherein the AAV vector genome comprises a sequence having at least 90%, at least 95%, at least 97%, at least 98%, at least 99%, or 100% identity to SEQ ID NO: 224.

[0442] Embodiment 53. The method of any one of Embodiments 30-52, wherein the AAV vector genome comprises a polynucleotide sequence having at least 90%, at least 95%, at least 97%, at least 98%, at least 99%, or 100% identity to any one of SEQ ID NO: 224 and 240-252.

[0443] Embodiment 54. The method of any one of Embodiments 30-53, wherein the ocular disease or disorder is X-linked retinoschisis.

[0444] Embodiment 55. The method of any one of Embodiments 1-54, wherein the AAV viral vector comprises an AAV capsid protein comprising an amino acid sequence that is at least 95% identical to SEQ ID NO: 1-3, 30-34, 49, 67, 84, or 164.

[0445] Embodiment 56. The method of Embodiment 55, wherein the AAV viral vector comprises an AAV capsid protein comprising an amino acid sequence that is at least 98%, at least 99%, at least 99.5%, or 100% identical to SEQ ID NO: 1-3, 30-34, 49, 67, 84 or 164.

[0446] Embodiment 57. The method of Embodiment 55, wherein the AAV viral vector comprises an AAV capsid protein comprising or consisting of an amino acid sequence that is at least 95%, at least 98%, at least 99%, at least 99.5%, or 100% identical to SEQ ID NO: 2.

[0447] Embodiment 58. The method of any one of Embodiments 11-57, wherein the administration is para-retinal administration.

[0448] Embodiment 59. The method of any one of Embodiments 1-10 and 58, wherein the para-retinal administration comprises injecting at a distance of between 0 and 13 millimeters (mm), between 0 and 10 mm, between 0 and 5 mm, or between 0 and 3 mm, from the surface of the retina in the posterior vitreous cavity of the eye.

[0449] Embodiment 60. The method of any one of Embodiments 1-59, wherein the AAV viral vector is administered at a dose of about 1010 to about 1012 viral genome (vg).

[0450] Embodiment 61. The method of any one of Embodiments 1-60, wherein the subject is a human.

[0451] Embodiment 62. A nucleic acid comprising, in 5′ to 3′ orientation:
[0452] (a) a first AAV inverted terminal repeat,
[0453] (b) a promoter,
[0454] (c) a heterologous nucleic acid encoding Opa1,
[0455] (d) a polyadenylation signal, and
[0456] (e) a second AAV inverted terminal repeat.

[0457] Embodiment 63. The nucleic acid of Embodiment 62, wherein the promoter is a CBh promoter comprising a sequence having at least 90%, at least 95%, at least 97%, at least 98%, at least 99%, or 100% identity to SEQ ID NO: 154.

[0458] Embodiment 64. The nucleic acid of Embodiment 62, wherein the promoter is a MeCP2 promoter comprising a sequence having at least 90%, at least 95%, at least 97%, at least 98%, at least 99%, or 100% identity to SEQ ID NO: 156.

[0459] Embodiment 65. The nucleic acid of any one of Embodiments 62-64, wherein the AAV vector genome comprises an intron sequence having at least 90%, at least 95%, at least 97%, at least 98%, at least 99%, or 100% identity to SEQ ID NO: 200 or 227, and wherein the intron sequence is located between the promoter and the heterologous nucleic acid encoding Opa1.

[0460] Embodiment 66. The nucleic acid of any one of Embodiments 62-65, wherein the intron sequence is located immediately downstream of the promoter, without any additional nucleotide in between.

[0461] Embodiment 67. The nucleic acid of any one of Embodiments 62-66, wherein the heterologous nucleic acid encoding Opa1 comprises a sequence having at least 90%, at least 95%, at least 97%, at least 98%, at least 99%, or 100% identity to any one of SEQ ID NO: 175, 182 and 184.

[0462] Embodiment 68. The nucleic acid of any one of Embodiments 62-67, wherein the heterologous nucleic acid encodes an Opa1 protein comprising an amino acid sequence having at least 90%, at least 95%, at least 97%, at least 98%, at least 99%, or 100% identity to any one of SEQ ID NO: 180, 183 and 185.

[0463] Embodiment 69. The nucleic acid of any one of Embodiments 62-67, wherein the heterologous nucleic acid encodes an Opa1 protein comprising an amino acid sequence having at least 90%, at least 95%, at least 97%, at least 98%, at least 99%, or 100% identity to SEQ ID NO: 180.

[0464] Embodiment 70. The nucleic acid of any one of Embodiments 62-69, wherein the polyadenylation signal comprises a sequence having at least 90%, at least 95%, at least 97%, at least 98%, at least 99%, or 100% identity to SEQ ID NO: 201 or 225.

[0465] Embodiment 71. The nucleic acid of any one of Embodiments 62-70, wherein the AAV vector genome does not comprise any telomeric repeats sequence.

[0466] Embodiment 72. The nucleic acid of any one of Embodiments 62-70, wherein the AAV vector genome comprises a first telomeric repeats sequence located between the polyadenylation signal and the second AAV inverted terminal repeat, and wherein the first telomeric repeats sequence has at least 90%, at least 95%, at least 97%, at least 98%, at least 99%, or 100% identity to SEQ ID NO: 202.

[0467] Embodiment 73. The nucleic acid of any one of Embodiments 62-72, wherein the AAV vector genome comprises a second telomeric repeats sequence located between the first AAV inverted terminal repeat and the promoter, and wherein the second telomeric repeats sequence has at least 90%, at least 95%, at least 97%, at least 98%, at least 99%, or 100% identity to SEQ ID NO: 203.

[0468] Embodiment 74. The nucleic acid of any one of Embodiments 62-73, wherein the first AAV inverted terminal repeat comprises or consists of a sequence having at least 90%, at least 95%, at least 97%, at least 98%, at least 99%, or 100% identity to SEQ ID NO: 253, and/or wherein the second AAV inverted terminal repeat comprises or consists of a sequence having at least 90%, at least 95%, at least 97%, at least 98%, at least 99%, or 100% identity to SEQ ID NO: 254.

[0469] Embodiment 75. The nucleic acid of any one of Embodiments 62-74, wherein the AAV vector genome comprises, in 5′ to 3′ orientation:
[0470] (a) the first AAV inverted terminal repeat,
[0471] (b) the promoter comprising a sequence having at least 90%, at least 95%, at least 97%, at least 98%, at least 99%, or 100% identity to SEQ ID NO: 154,
[0472] (c) the heterologous nucleic acid encoding Opa1,
[0473] (d) the polyadenylation signal comprises a sequence having at least 90%, at least 95%, at least 97%, at least 98%, at least 99%, or 100% identity to SEQ ID NO: 201, and
[0474] (e) the second AAV inverted terminal repeat.

[0475] Embodiment 76. The nucleic acid of Embodiment 75, comprising an intron sequence having at least 90%, at least 95%, at least 97%, at least 98%, at least 99%, or 100% identity to SEQ ID NO: 200, and wherein the intron sequence is located between the promoter and the heterologous nucleic acid encoding Opa1.

[0476] Embodiment 77. The nucleic acid of Embodiment 75 or 76, wherein the Opa1 protein comprises an amino acid sequence having at least 90%, at least 95%, at least 97%, at least 98%, at least 99%, or 100% identity to SEQ ID NO: 180.

[0477] Embodiment 78. The nucleic acid of any one of Embodiments 75-77, comprising a sequence having at least 90%, at least 95%, at least 97%, at least 98%, at least 99%, or 100% identity to SEQ ID NO: 228.

[0478] Embodiment 79. The nucleic acid of any one of Embodiments 62-78, comprising a polynucleotide sequence having at least 90%, at least 95%, at least 97%, at least 98%, at least 99%, or 100% identity to any one of SEQ ID NO: 230-239.

[0479] Embodiment 80. A nucleic acid comprising, in 5′ to 3′ orientation:
[0480] (a) a first AAV inverted terminal repeat,
[0481] (b) a promoter,
[0482] (c) a heterologous nucleic acid encoding RS1,
[0483] (d) a polyadenylation signal, and
[0484] (e) a second AAV inverted terminal repeat.

[0485] Embodiment 81. The nucleic acid of Embodiment 80, wherein the promoter is a photoreceptor-specific promoter.

[0486] Embodiment 82. The nucleic acid of Embodiment 81, wherein the photoreceptor-specific promoter is selected from the group consisting of a rhodopsin kinase (RK) promoter, a rhodopsin (RHO) promoter, a beta phosphodiesterase (PDE) promoter, and a retinitis pigmentosa (RP1) promoter.

[0487] Embodiment 83. The nucleic acid of Embodiment 80, wherein the promoter is a CBh promoter comprising a sequence having at least 90%, at least 95%, at least 97%, at least 98%, at least 99%, or 100% identity to SEQ ID NO: 154.

[0488] Embodiment 84. The nucleic acid of Embodiment 80, wherein the promoter is a RK promoter comprising a sequence having at least 90%, at least 95%, at least 97%, at least 98%, at least 99%, or 100% identity to SEQ ID NO: 196.

[0489] Embodiment 85. The nucleic acid of Embodiment 80, wherein the promoter is a Rho promoter comprising a sequence having at least 90%, at least 95%, at least 97%, at least 98%, at least 99%, or 100% identity to SEQ ID NO: 197.

[0490] Embodiment 86. The nucleic acid of Embodiment 80, wherein the promoter is a PDE promoter comprising a sequence having at least 90%, at least 95%, at least 97%, at least 98%, at least 99%, or 100% identity to SEQ ID NO: 198.

[0491] Embodiment 87. The nucleic acid of any one of Embodiments 80-86, comprising an IRBP enhancer sequence upstream of the promoter, wherein the IRBP enhancer sequence has at least 90%, at least 95%, at least 97%, at least 98%, at least 99%, or 100% identity to SEQ ID NO: 199.

[0492] Embodiment 88. The nucleic acid of Embodiments 87, wherein the IRBP enhancer sequence is located immediately upstream of the promoter, without any additional nucleotide in between.

[0493] Embodiment 89. The nucleic acid of any one of Embodiments 80-88, wherein the AAV vector genome comprises a CVA-MVM intron sequence having at least 90%, at least 95%, at least 97%, at least 98%, at least 99%, or 100% identity to SEQ ID NO: 226, and wherein the CVA-MVM intron sequence is located between the promoter and the heterologous nucleic acid encoding RS1.

[0494] Embodiment 90. The nucleic acid of any one of Embodiments 80-88, wherein the AAV vector genome comprises an intron sequence having at least 90%, at least 95%, at least 97%, at least 98%, at least 99%, or 100% identity to SEQ ID NO: 200 or 222, and wherein the intron is located between the promoter and the heterologous nucleic acid encoding RS1.

[0495] Embodiment 91. The nucleic acid of any one of Embodiments 80-88, wherein the heterologous nucleic acid encoding RS1 comprises a sequence having at least 90%, at least 95%, at least 97%, at least 98%, at least 99%, or 100% identity to SEQ ID NO: 117.

[0496] Embodiment 92. The nucleic acid of any one of Embodiments 80-91, wherein the heterologous nucleic acid encodes an RS1 protein comprising an amino acid sequence having at least 90%, at least 95%, at least 97%, at least 98%, at least 99%, or 100% identity to SEQ ID NO: 143.

[0497] Embodiment 93. The nucleic acid of any one of Embodiments 80-92, wherein the polyadenylation signal comprises a sequence having at least 90%, at least 95%, at least 97%, at least 98%, at least 99%, or 100% identity to SEQ ID NO: 201 or 225.

[0498] Embodiment 94. The nucleic acid of any one of Embodiments 80-93, wherein the AAV vector genome does not comprise any telomeric repeats sequence.

[0499] Embodiment 95. The nucleic acid of any one of Embodiments 80-93, wherein the AAV vector genome comprises a first telomeric repeats sequence located between the polyadenylation signal and the second AAV inverted terminal repeat, and wherein the first telomeric repeats sequence has at least 90%, at least 95%, at least 97%, at least 98%, at least 99%, or 100% identity to SEQ ID NO: 203.

[0500] Embodiment 96. The nucleic acid of any one of Embodiments 80-95, wherein the AAV vector genome comprises a human beta-globin scaffold/matrix attachment region (βGlo_s/MAR) sequence located between the polyadenylation signal and the second AAV inverted terminal repeat, or the polyadenylation signal and the first telomeric repeats sequence, wherein the βGlo_s/MAR sequence has at least 90%, at least 95%, at least 97%, at least 98%, at least 99%, or 100% identity to SEQ ID NO: 221.

[0501] Embodiment 97. The nucleic acid of any one of Embodiments 80-96, wherein the first AAV inverted terminal repeat comprises or consists of a sequence having at least 90%, at least 95%, at least 97%, at least 98%, at least 99%, or 100% identity to SEQ ID NO: 255, and/or wherein the second AAV inverted terminal repeat comprises or consists of a sequence having at least 90%, at least 95%, at least 97%, at least 98%, at least 99%, or 100% identity to SEQ ID NO: 256.

[0502] Embodiment 98. The nucleic acid of any one of Embodiments 80-97, wherein the AAV vector genome comprises, in 5′ to 3′ orientation:
[0503] (a) the first AAV inverted terminal repeat,
[0504] (b) the IRBP enhancer sequence having at least 90%, at least 95%, at least 97%, at least 98%, at least 99%, or 100% identity to SEQ ID NO: 199,
[0505] (c) the RK promoter comprising a sequence having at least 90%, at least 95%, at least 97%, at least 98%, at least 99%, or 100% identity to SEQ ID NO: 196,
[0506] (d) the heterologous nucleic acid encoding RS1,
[0507] (e) the polyadenylation signal comprising a sequence having at least 90%, at least 95%, at least 97%, at least 98%, at least 99%, or 100% identity to SEQ ID NO: 225, and
[0508] (f) the second AAV inverted terminal repeat.

[0509] Embodiment 99. The nucleic acid of any one of Embodiments 80-98, comprising an intron sequence having at least 90%, at least 95%, at least 97%, at least 98%, at least 99%, or 100% identity to SEQ ID NO: 222, and wherein the intron sequence is located between the promoter and the heterologous nucleic acid encoding RS1.

[0510] Embodiment 100. The nucleic acid of Embodiment 99, comprising a CBA sequence of SEQ ID NO: 229, or a sequence having at most 5, at most 4, at most 3, at most 2, or at most 1 mutation(s) thereto, and wherein the CBA sequence is located immediately upstream of the intron sequence without any additional nucleotides in between.

[0511] Embodiment 101. The nucleic acid of Embodiment 99 or 100, comprising a CBA-MVM intron sequence having at least 90%, at least 95%, at least 97%, at least 98%, at least 99%, or 100% identity to SEQ ID NO: 226, and wherein the CVA-MVM intron sequence is located between the promoter and the heterologous nucleic acid encoding RS1.

[0512] Embodiment 102. The nucleic acid of any one of Embodiments 98-101, comprising a sequence having at least 90%, at least 95%, at least 97%, at least 98%, at least 99%, or 100% identity to SEQ ID NO: 224.

[0513] Embodiment 103. The nucleic acid of any one of Embodiments 80-102, comprising a polynucleotide sequence having at least 90%, at least 95%, at least 97%, at least 98%, at least 99%, or 100% identity to any one of SEQ ID NO: 224 and 240-252.

[0514] Embodiment 104. A nucleic acid comprising, in 5′ to 3′ orientation:
[0515] (a) a promoter,
[0516] (b) a heterologous nucleic acid encoding a transgene, and
[0517] (c) a polyadenylation signal,
   wherein the promoter is a CBh promoter comprising a sequence having at least 90%, at least 95%, at least 97%, at least 98%, at least 99%, or 100% identity to SEQ ID NO: 154, and wherein the polyadenylation signal comprises a sequence having at least 90%, at least 95%, at least 97%, at least 98%, at least 99%, or 100% identity to SEQ ID NO: 201 or 225.

[0518] Embodiment 105. The nucleic acid of Embodiment 104, comprising an intron sequence having at least 90%, at least 95%, at least 97%, at least 98%, at least 99%, or 100% identity to SEQ ID NO: 200, 222, 226, or 227, and wherein the intron is located between the promoter and the heterologous nucleic acid encoding the transgene.

[0519] Embodiment 106. The nucleic acid of any one of Embodiments 104-105, comprising a first ITR that is located 5′ to the promoter, and a second ITR that is located 3′ to the polyadenylation signal.

[0520] Embodiment 107. The nucleic acid of any one of Embodiments 104-106, wherein the nucleic acid does not comprise any telomeric repeats sequence.

[0521] Embodiment 108. The nucleic acid of any one of Embodiments 104-106, comprising a first telomeric repeats sequence located between the polyadenylation signal and the second AAV ITR, and wherein the first telomeric repeats sequence has at least 90%, at least 95%, at least 97%, at least 98%, at least 99%, or 100% identity to SEQ ID NO: 202.

[0522] Embodiment 109. The nucleic acid of any one of Embodiments 104-108, comprising a second telomeric repeats sequence located between the first AAV inverted terminal repeat and the promoter, and wherein the second telomeric repeats sequence has at least 90%, at least 95%, at least 97%, at least 98%, at least 99%, or 100% identity to SEQ ID NO: 203.

[0523] Embodiment 110. A vector comprising the nucleic acid of any one of Embodiments 62-109.

[0524] Embodiment 111. An AAV vector genome comprising the nucleic acid of any one of Embodiments 62-109.

[0525] Embodiment 112. An AAV viral vector comprising the AAV vector genome of Embodiment 111.

[0526] Embodiment 113. The AAV viral vector of Embodiment 112, wherein the AAV viral vector comprises the AAV capsid protein comprising an amino acid sequence that is at least 95%, at least 98%, at least 99%, at least 99.5%, or 100% identical to any one of SEQ ID NO: 1-3, 30-34, 49, 84 and 164.

[0527] Embodiment 114. A method of expressing a transgene in a retinal cell, comprising delivering the nucleic acid of any one of Embodiments 62-109 to the retinal cell, or transducing the retinal cell with the AAV viral vector of any one of Embodiments 112-113.

[0528] Embodiment 115. The method of Embodiment 114, wherein the retinal cell is a retinal ganglion cell.

[0529] Embodiment 116. A method of treating a disease or disorder comprising administering the AAV viral vector of any one of Embodiments 112-113 to a subject.

[0530] Embodiment 117. The method of Embodiment 116, wherein the AAV viral vector is administered to the subject intra-ocularly, peri-ocularly, intravitreally, para-retinally, or sub-retinally.

[0531] Embodiment 118. The method of Embodiment 116 or 117, wherein the disease or disorder is macular degeneration, retinitis pigmentosa, Autosomal Dominant Optic Atrophy, Retinoschisis, Stargardt disease, Bietti's Crystalline Dystrophy or BEST vitelliform macular dystrophy.

[0532] Embodiment 119. The method of Embodiment 116 or 117, wherein the disease or disorder is X-linked Retinoschisis (XLRS).

The application's sequence listing, which the Patent Office published only in electronic form, follows.

SEQUENCE LISTING (256 sequences)

SEQ ID NO: 1 - protein, 737 aa, synthetic construct
  REGION 1..737: note = AAV110 VPl
MAADGYLPDWLEDNLSEGIREWWDLKPGAPKPKANQQKQDDGRGLVLPGYKYLGPFNGLDKGEPVNAADAAALEHDKAYDQQLKAGDNPYLRYNHADAEFQERLQEDTSFGGNLGRAVFQAKKRVLEPLGLVEEGAKTAPGKKRPVEPSPQRSPDSSTGIGKKGQQPARKRLNFGQTGDSESVPDPQPLGEPPATPAAVGPTTMASGGGAPMADNNEGADGVGNASGNWHCDSTWLGDRVITTSTRTWALPTYNNHLYKQISSASTGASNDNHYFGYSTPWGYFDFNRFHCHFSPRDWQRLINNNWGFRPKRLNFKLFNIQVKEVTTNDGVTTIANNLTSTVQVFSDSEYQLPYVLGSAHQGCLPPFPADVFMIPQYGYLTLNNGSQAVGRSSFYCLEYFPSQMLRTGNNFTFSYTFEDVPFHSSYAHSQSLDRLMNPLIDQYLYYLNRTQNQSGSAQNKDLLFSRGSPAGMSVQPKNWLPGPCYRQQRVSKTKTDNNNSNFTWTGASKYNLNGRESIINPGTAMASHKDDKDKFFPMSGVMIFGKESAGASNTALDNVMITDEEEIKATNPVATERFGTVAVNLQSSSTDPATGDVHVMGALPGMVWQDRDVYLQGPIWAKIPHTDGHFHPSPLMGGFGLKHPPPQILIKNTPVPANPPAEFSATKFASFITQYSTGQVSVEIEWELQKENSKRWNPEVQYTSNYAKSANVDFTVDNNGLYTEPRPIGTRYLTRPL

SEQ ID NO: 2 - protein, 736 aa, synthetic construct
  REGION 1..736: note = AAV204 VP1
MAADGYLPDWLEDNLSEGIREWWDLKPGAPKPKANQQKQDDGRGLVLPGYKYLGPFNGLDKGEPVNAADAAALEHDKAYDQQLKAGDNPYLRYNHADAEFQERLQEDTSFGGNLGRAVFQAKKRVLEPLGLVEEGAKTAPGKKRPVEQSPQEPDSSSGIGKTGQQPAKKRLNFGQTGDSESVPDPQPLGEPPATPAAVGPTTMASGGGAPMADNNEGADGVGNASGNWHCDSTWLGDRVITTSTRTWALPTYNNHLYKQISSASTGASNDNHYFGYSTPWGYFDFNRFHCHFSPRDWQRLINNNWGFRPKRLNFKLFNIQVKEVTTNDGVTTIANNLTSTVQVFSDSEYQLPYVLGSAHQGCLPPFPADVFMIPQYGYLTLNNGSQAVGRSSFYCLEYFPSQMLRTGNNFTFSYTFEDVPFHSSYAHSQSLDRLMNPLIDQYLYYLNRTQNQSGSAQNKDLLFSRGSPAGMSVQPKNWLPGPCYRQQRVSKTKTDNNNSNFTWTGASKYNLNGRESIINPGTAMASHKDDKDKFFPMSGVMIFGKESAGASNTALDNVMITDEEEIKATNPVATERFGTVAVNLQNSSTDPATGDVHVMGALPGMVWQDRDVYLQGPIWAKIPHTDGHFHPSPLMGGFGLKHPPPQILIKNTPVPANPPAEFSATKFASFITQYSTGQVSVEIEWELQKENSKRWNPEVQYTSNYAKSANVDFTVDNNGLYTEPRPIGTRYLTRPL

SEQ ID NO: 3 - protein, 735 aa, synthetic construct
  REGION 1..735: note = AAV214 VPl
MAADGYLPDWLEDNLSEGIREWWALKPGAPKPKANQQKQDDGRGLVLPGYKYLGPFNGLDKGEPVNAADAAALEHDKAYDQQLKAGDNPYLRYNHADAEFQERLQEDTSFGGNLGRAVFQAKKRVLEPFGLVEEGAKTAPGKKRPVEQSPQEPDSSSGIGKTGQQPAKKRLNFGQTGDSESVPDPQPLGEPPATPAAVGPTTMASGGGAPMADNNEGADGVGNASGNWHCDSTWLGDRVITTSTRTWALPTYNNHLYKQISSASTGASNDNHYFGYSTPWGYFDFNRFHCHFSPRDWQRLINNNWGFRPKRLNFKLFNIQVKEVTDNNGVKTIANNLTSTVQVFTDSDYQLPYVLGSAHQGCLPPFPADVFMIPQYGYLTLNDGSQAVGRSSFYCLEYFPSQMLRTGNNFTFSYTFEDVPFHSSYAHSQSLDRLMNPLIDQYLYYLSKTINGSGQNQQTLKFSQGGPNTMANQAKNWLPGPCYRQQRVSTTTGQNNNSNFAWTAGTKYHLNGRNSLMNPGPAMASHKEGEDRFFPLSGSLIFGKQNAARDNADYSDVMLTSEEEIKTTNPVATEEYGIVADNLQQQNTAPQIGTVNSQGALPGMVWQNRDVYLQGPIWAKIPHTDGNFHPSPLMGGFGLKHPPPQILIKNTPVPADPPTTFNQSKLNSFITQYSTGQVSVEIEWELQKENSKRWNPEIQYTSNYYKSTSVDFAVNTEGVYSEPHPIGTRYLTRPL

SEQ ID NO: 4 - DNA, 4287 bp, synthetic construct
  misc_feature 1..4287: note = CFTRdeltaR
  source 1..4287: mol_type = other DNA
atgcagagaagccccctggagaaggcctctgtggtgagcaagctgttcttcagctggaccagacccatcctgagaaagggctacagacagagactggagctgtctgacatctaccagatcccctctgtggactctgctgacaacctgtctgagaagctggagagagagtgggacagagagctggccagcaagaagaaccccaagctgatcaatgccctgagaagatgcttcttctggagattcatgttctatggcatcttcctgtacctgggggaggtgaccaaggctgtgcagcccctgctgctgggcagaatcattgccagctatgaccctgacaacaaggaggagagaagcattgccatctacctgggcattggcctgtgcctgctgttcattgtgagaaccctgctgctgcaccctgccatctttggcctgcaccacattggcatgcagatgagaattgccatgttcagcctgatctacaagaagaccctgaagctgagcagcagagtgctggacaagatcagcattggccagctggtgagcctgctgagcaacaacctgaacaagtttgatgagggcctggccctggcccactttgtgtggattgcccccctgcaggtggccctgctgatgggcctgatctgggagctgctgcaggcctctgccttctgtggcctgggcttcctgattgtgctggccctgttccaggctggcctgggcagaatgatgatgaagtacagagaccagagagctggcaagatctctgagagactggtgatcacctctgagatgattgagaacatccagtctgtgaaggcctactgctgggaggaggccatggagaagatgattgagaacctgagacagacagagctgaagctgaccagaaaggctgcctatgtgagatacttcaacagctctgccttcttcttctctggcttctttgtggtgttcctgtctgtgctgccctatgccctgatcaagggcatcatcctgagaaagatcttcaccaccatcagcttctgcattgtgctgagaatggctgtgaccagacagttcccctgggctgtgcagacctggtatgacagcctgggggccatcaacaagatccaggacttcctgcagaagcaggagtacaagaccctggagtacaacctgaccaccacagaggtggtgatggagaatgtgacagccttctgggaggagggctttggggagctgtttgagaaggccaagcagaacaacaacaacagaaagaccagcaatggggatgacagcctgttcttcagcaacttcagcctgctgggcacccctgtgctgaaggacatcaacttcaagattgagagaggccagctgctggctgtggctggcagcacaggggctggcaagaccagcctgctgatgatgatcatgggggagctggagccctctgagggcaagatcaagcactctggcagaatcagcttctgcagccagttcagctggatcatgcctggcaccatcaaggagaacatcatctttggggtgagctatgatgagtacagatacagatctgtgatcaaggcctgccagctggaggaggacatcagcaagtttgctgagaaggacaacattgtgctgggggaggggggcatcaccctgtctgggggccagagagccagaatcagcctggccagagctgtgtacaaggatgctgacctgtacctgctggacagcccctttggctacctggatgtgctgacagagaaggagatctttgagagctgtgtgtgcaagctgatggccaacaagaccagaatcctggtgaccagcaagatggagcacctgaagaaggctgacaagatcctgatcctgcatgagggcagcagctacttctatggcaccttctctgagctgcagaacctgcagcctgacttcagcagcaagctgatgggctgtgacagctttgaccagttctctgctgagagaagaaacagcatcctgacagagaccctgcacagattcagcctggagggggatgcccctgtgagctggacagagaccaagaagcagagcttcaagcagacaggggagtttggggagaagagaaagaacagcatcctgaaccccatcaacagcaccctgcaggccagaagaagacagtctgtgctgaacctgatgacccactctgtgaaccagggccagaacatccacagaaagaccacagccagcaccagaaaggtgagcctggccccccaggccaacctgacagagctggacatctacagcagaagactgagccaggagacaggcctggagatctctgaggagatcaatgaggaggacctgaaggagtgcttctttgatgacatggagagcatccctgctgtgaccacctggaacacctacctgagatacatcacagtgcacaagagcctgatctttgtgctgatctggtgcctggtgatcttcctggctgaggtggctgccagcctggtggtgctgtggctgctgggcaacacccccctgcaggacaagggcaacagcacccacagcagaaacaacagctatgctgtgatcatcaccagcaccagcagctactatgtgttctacatctatgtgggggtggctgacaccctgctggccatgggcttcttcagaggcctgcccctggtgcacaccctgatcacagtgagcaagatcctgcaccacaagatgctgcactctgtgctgcaggcccccatgagcaccctgaacaccctgaaggctgggggcatcctgaacagattcagcaaggacattgccatcctggatgacctgctgcccctgaccatctttgacttcatccagctgctgctgattgtgattggggccattgctgtggtggctgtgctgcagccctacatctttgtggccacagtgcctgtgattgtggccttcatcatgctgagagcctacttcctgcagaccagccagcagctgaagcagctggagtctgagggcagaagccccatcttcacccacctggtgaccagcctgaagggcctgtggaccctgagagcctttggcagacagccctactttgagaccctgttccacaaggccctgaacctgcacacagccaactggttcctgtacctgagcaccctgagatggttccagatgagaattgagatgatctttgtgatcttcttcattgctgtgaccttcatcagcatcctgaccacaggggagggggagggcagagtgggcatcatcctgaccctggccatgaacatcatgagcaccctgcagtgggctgtgaacagcagcattgatgtggacagcctgatgagatctgtgagcagagtgttcaagttcattgacatgcccacagagggcaagcccaccaagagcaccaagccctacaagaatggccagctgagcaaggtgatgatcattgagaacagccatgtgaagaaggatgacatctggccctctgggggccagatgacagtgaaggacctgacagccaagtacacagaggggggcaatgccatcctggagaacatcagcttcagcatcagccctggccagagagtgggcctgctgggcagaacaggctctggcaagagcaccctgctgtctgccttcctgagactgctgaacacagagggggagatccagattgatggggtgagctgggacagcatcaccctgcagcagtggagaaaggcctttggggtgatcccccagaaggtgttcatcttctctggcaccttcagaaagaacctggacccctatgagcagtggtctgaccaggagatctggaaggtggctgatgaggtgggcctgagatctgtgattgagcagttccctggcaagctggactttgtgctggtggatgggggctgtgtgctgagccatggccacaagcagctgatgtgcctggccagatctgtgctgagcaaggccaagatcctgctgctggatgagccctctgcccacctggaccctgtgacctaccagatcatcagaagaaccctgaagcaggcctttgctgactgcacagtgatcctgtgtgagcacagaattgaggccatgctggagtgccagcagttcctggtgattgaggagaacaaggtgagacagtatgacagcatccagaagctgctgaatgagagaagcctgttcagacaggccatcagcccctctgacagagtgaagctgttcccccacagaaacagcagcaagtgcaagagcaagccccagattgctgccctgaaggaggagaccgaggaggaggtgcaggacaccagactgtaa

SEQ ID NO: 5 - DNA, 2859 bp, synthetic construct
  misc_feature 1..2859: note = GAA
  source 1..2859: mol_type = other DNA
atgggagtccgccacccgccctgctcacatcgcctgcttgctgtctgtgccctcgtgtcacttgctaccgccgcgctgcttggtcacattctgctgcacgactttttactagttccgagggaactgtcgggatccagccccgtgctcgaggaaactcaccccgcgcaccaacagggggcgtccaggccgggaccgcgcgacgcccaggcccacccgggccggcctcgggccgtgccaactcagtgcgatgtgccgccgaactcccgcttcgactgtgcgcctgacaaggccataacccaggaacagtgcgaagcacgcggctgctgctatattccggcgaagcagggcttgcagggtgcccaaatgggtcagccttggtgcttctttcccccgtcgtacccctcgtacaagctggagaacctgagcagcagcgaaatggggtacaccgccactctgacccggacgaccccgaccttcttcccgaaagacatcctgaccctgcggctggatgtgatgatggaaactgagaacagactgcacttcactatcaaggaccccgcgaaccgcagatatgaggtgccactggaaacccctcatgtgcattcccgggccccatcccctctgtactcggtggaattctccgaagaacccttcggggtcattgtgcgccggcagcttgatggccgggtcctgctcaacaccaccgtggcaccccttttcttcgctgaccagttcctccagctgagcacctcgctgccgagccagtacatcaccggactggccgagcacctctcccctctgatgctgtccactagctggactaggatcactctgtggaaccgggatctggcccctaccccgggcgcgaacctgtacggatcgcaccccttctacctggccctcgaggacggaggctccgcccacggagtgttcctgctgaactccaacgctatggacgtggtgctccagccgtcccctgcactgtcctggcggagcacagggggtattctggatgtctacatcttcctcggcccggagccaaagtccgtggtgcaacagtatctggatgtcgtgggttacccattcatgccgccatactggggccttggcttccacctgtgccgctggggatacagctccaccgccatcactagacaggtcgtggaaaacatgactagagcccacttccccctcgatgtccagtggaatgacctggactacatggattccagacgcgacttcactttcaacaaggatggattcagagatttccccgctatggtccaagaactgcaccagggtggccggcggtacatgatgattgtggaccccgccatttcaagctccggaccagcgggctcgtaccggccctacgacgaaggtttgcgccgcggcgtgttcatcactaacgaaaccggccagccactgattgggaaggtctggcctggaagcaccgcgttcccggacttcactaacccaacggccttggcgtggtgggaggacatggtggccgaattccacgaccaagtcccattcgacggaatgtggatcgacatgaacgagcccagcaacttcatccgaggctccgaggacggctgccctaacaacgaacttgagaaccctccgtacgtgcctggcgtcgtcggcggaacactgcaggccgctacgatctgtgcctcatcgcatcagttcctgtcaacccactacaacctccataatctgtacggcctcaccgaagccatcgcctcccaccgggccctggtcaaggcccgggggactaggcccttcgtgattagccggagcactttcgccggacacggaagatacgccggacattggaccggcgacgtgtggtcatcgtgggagcagctcgcctcctccgtccccgaaatcctgcagttcaatctcctgggagtccccctcgtgggcgcggacgtgtgcggattcctgggcaatacctctgaggagctgtgcgtgagatggacccagctgggggcgttctaccccttcatgcggaaccacaactcactgctgtccctgcctcaagagccgtactcattctccgagccggcacaacaggccatgcgaaaggctctgaccctccgctatgcgctcttgccccacctctacactctgtttcaccaagcccatgtcgcgggcgaaacagtggccagaccactctttctggaattcccaaaggactcctcaacctggactgtggatcatcagctgctctggggagaggcactgctgatcaccccggtgctccaagccggaaaggcggaagtgaccggatacttccctctcggtacttggtacgacctccaaaccgtgccggtcgaggccctgggcagcttgcctccgccgccggctgccccgcgggagcctgcaatccactccgaggggcaatgggtgaccctccctgcaccactggacaccatcaacgtgcacctccgggccggctacatcatcccgctgcaaggaccgggtctgactaccaccgaatcccggcagcagcccatggcactggccgtggccctgaccaagggaggggaagcacggggagaactcttttgggacgatggagaatccctggaagtgctcgagcggggagcctacactcaagtcatctttcttgcccgcaacaacaccatcgtgaacgaattggtccgcgtgacctccgagggggccggactccagctgcaaaaagtgaccgtgctgggggtggcaaccgccccgcaacaagtgttgtctaacggagtgccggtgtccaacttcacctactcccctgataccaaagttctagatatttgcgtgagcctgctgatgggagaacagttcctggtgtcctggtgctga

SEQ ID NO: 6 - DNA, 2859 bp, synthetic construct; identical to SEQ ID NO: 5
  misc_feature 1..2859: note = GAA codon-optimized nucleotide sequence 1 (GAA 15)
  source 1..2859: mol_type = other DNA

SEQ ID NO: 7 - DNA, 2859 bp, synthetic construct
  misc_feature 1..2859: note = GAA Codon-optimized 2 (GAA21)
  source 1..2859: mol_type = other DNA
atgggagttagacaccctccatgtagccacagactgctggccgtgtgtgctctggtgtctctggctacagctgccctgctgggacatatcctgctgcacgacttcttactagttcccagagagctgtccggcagcagccctgtgctggaagaaacacaccctgcacatcagcagggcgcctctagacctggacctagagatgctcaggcccatcctggcagacctagagctgtgcccacacagtgtgacgtgccacctaacagcagattcgactgcgcccctgacaaggccatcacacaagagcagtgtgaagccagaggctgctgctacatccctgccaaacaaggactgcagggcgctcagatgggacagccctggtgcttcttcccaccatcttaccccagctacaagctggaaaacctgagcagcagcgagatgggctacaccgccacactgaccagaaccacacctacattcttcccgaaggacatcctgacactgcggctggacgtgatgatggaaaccgagaaccggctgcacttcaccatcaaggaccccgccaatcggagatacgaggtgccactggaaacccctcacgtgcactctagagccccatctccactgtacagcgtggaattcagcgaggaacccttcggcgtgatcgtgcggagacagctggatggaagagtgctgctgaacaccacagtggcccctctgttcttcgccgaccagtttctgcagctgtccaccagcctgcctagccagtatatcacaggcctggccgagcacctgtctccactgatgctgtctaccagctggacccggatcaccctgtggaacagggatcttgctcctacacctggcgccaacctgtacggctctcaccctttttatctggccctggaagatggcggatctgcccacggtgtctttctgctgaactccaacgccatggacgtggtgctgcagccatctcctgctctgtcttggagaagcacaggcggcatcctggacgtgtacatctttctgggccccgagcctaagagcgtggtgcagcagtatctggacgtcgtgggctaccccttcatgcctccttattggggcctgggcttccacctgtgcagatggggatacagcagcaccgccatcaccagacaggtggtggaaaacatgacccgggctcacttcccactggatgtgcagtggaacgacctggactacatggacagcagacgggacttcaccttcaacaaggacggcttcagagacttccccgccatggtgcaagaactgcaccaaggcggcagacggtacatgatgatcgtggatccagccatcagctctagcggccctgccggctcttacagaccttacgatgagggcctgagaagaggcgtgttcatcaccaacgagacaggccagcctctgatcggcaaagtgtggcctggcagcacagcctttccagacttcacaaaccccaccgctctggcttggtgggaagatatggtggccgagtttcacgatcaggtgcccttcgacggcatgtggatcgacatgaacgagcccagcaacttcatccggggcagcgaggatggctgccccaacaacgaactggaaaatcctccttacgtgcccggcgttgtcggcggaacacttcaggccgctacaatctgtgccagcagccaccagttcctcagcacccactacaacctgcacaatctgtatggcctgaccgaggccattgccagccatagagccctggttaaggccaggggcaccagacctttcgtgatcagcagaagcaccttcgccggccacggcagatatgccggacattggacaggcgacgtgtggtctagttgggagcagctggctagcagcgtgccagagatcctgcagttcaatctgctgggcgtgccactcgtgggagccgatgtttgtggcttcctgggcaacacctccgaggaactgtgtgtgcgttggacacagctgggcgccttctatcccttcatgagaaaccacaacagccttctcagcctgccacaagagccctacagcttctctgagcctgcacagcaggccatgagaaaggccctgactctgagatacgctctgctgccccacctgtacaccctgtttcaccaggctcatgtggccggggagacagtggctagacctctgttcctggaattccccaaggacagctccacctggaccgtggatcatcagctgctgtggggagaagccctgctcatcacacctgttctgcaggccggaaaggccgaagtgaccggctattttcctctcggcacttggtacgacctgcagaccgtgcctgttgaggctctgggatctcttcctccacctcctgccgctcctagagagcctgccattcactctgaaggccagtgggttaccctgcctgctcctctggacaccatcaacgtgcacctgagagctggctacatcatccctctgcaaggccctggcctgacaaccaccgaatctagacagcagcccatggctctggccgtggctttgacaaaaggcggagaggctagaggcgagctgttctgggatgatggcgagagcctggaagtgctggaacggggcgcttatacccaagtgatcttcctggccagaaacaacaccatcgtgaacgaactcgtgcgcgtgaccagtgaaggtgctggactgcaactgcagaaagtgaccgtgctcggagtggccacagcacctcagcaggttctgtctaatggcgtgcccgtgtccaacttcacatacagccccgacaccaaggtcctggacatctgtgtgtcactgctgatgggcgagcagttcctggtgtcctggtgttga

SEQ ID NO: 8 - protein, 952 aa, Homo sapiens
  REGION 1..952: note = Acid Alpha-Glucosidase (GAA)
MGVRHPPCSHRLLAVCALVSLATAALLGHILLHDFLLVPRELSGSSPVLEETHPAHQQGASRPGPRDAQAHPGRPRAVPTQCDVPPNSRFDCAPDKAITQEQCEARGCCYIPAKQGLQGAQMGQPWCFFPPSYPSYKLENLSSSEMGYTATLTRTTPTFFPKDILTLRLDVMMETENRLHFTIKDPANRRYEVPLETPHVHSRAPSPLYSVEFSEEPFGVIVRRQLDGRVLLNTTVAPLFFADQFLQLSTSLPSQYITGLAEHLSPLMLSTSWTRITLWNRDLAPTPGANLYGSHPFYLALEDGGSAHGVFLLNSNAMDVVLQPSPALSWRSTGGILDVYIFLGPEPKSVVQQYLDVVGYPFMPPYWGLGFHLCRWGYSSTAITRQVVENMTRAHFPLDVQWNDLDYMDSRRDFTFNKDGFRDFPAMVQELHQGGRRYMMIVDPAISSSGPAGSYRPYDEGLRRGVFITNETGQPLIGKVWPGSTAFPDFTNPTALAWWEDMVAEFHDQVPFDGMWIDMNEPSNFIRGSEDGCPNNELENPPYVPGVVGGTLQAATICASSHQFLSTHYNLHNLYGLTEAIASHRALVKARGTRPFVISRSTFAGHGRYAGHWTGDVWSSWEQLASSVPEILQFNLLGVPLVGADVCGFLGNTSEELCVRWTQLGAFYPFMRNHNSLLSLPQEPYSFSEPAQQAMRKALTLRYALLPHLYTLFHQAHVAGETVARPLFLEFPKDSSTWTVDHQLLWGEALLITPVLQAGKAEVTGYFPLGTWYDLQTVPVEALGSLPPPPAAPREPAIHSEGQWVTLPAPLDTINVHLRAGYIIPLQGPGLTTTESRQQPMALAVALTKGGEARGELFWDDGESLEVLERGAYTQVIFLARNNTIVNELVRVTSEGAGLQLQKVTVLGVATAPQQVLSNGVPVSNFTYSPDTKVLDICVSLLMGEQFLVSWC

SEQ ID NO: 9 - DNA, 1290 bp, synthetic construct
  misc_feature 1..1290: note = GLA
  source 1..1290: mol_type = other DNA
atgcagctgaggaacccagaactacatctgggctgcgcgcttgcgcttcgcttcctggccctcgtttcctgggacatccctggggctagagcactggacaatggattggcaaggacgcctaccatgggctggctgcactgggagcgcttcatgtgcaaccttgactgccaggaagagccagattcctgcatcagtgagaagctcttcatggagatggcagagctcatggtctcagaaggctggaaggatgcaggttatgagtacctctgcattgatgactgttggatggctccccaaagagattcagaaggcagacttcaggcagaccctcagcgctttcctcatgggattcgccagctagctaattatgttcacagcaaaggactgaagctagggatttatgcagatgttggaaataaaacctgcgcaggcttccctgggagttttggatactacgacattgatgcccagacctttgctgactggggagtagatctgctaaaatttgatggttgttactgtgacagtttggaaaatttggcagatggttataagcacatgtccttggccctgaataggactggcagaagcattgtgtactcctgtgagtggcctctttatatgtggccctttcaaaagcccaattatacagaaatccgacagtactgcaatcactggcgaaattttgctgacattgatgattcctggaaaagtataaagagtatcttggactggacatcttttaaccaggagagaattgttgatgttgctggaccagggggttggaatgacccagatatgttagtgattggcaactttggcctcagctggaatcagcaagtaactcagatggccctctgggctatcatggctgctcctttattcatgtctaatgacctccgacacatcagccctcaagccaaagctctccttcaggataaggacgtaattgccatcaatcaggaccccttgggcaagcaagggtaccagcttagacagggagacaactttgaagtgtgggaacgacctctctcaggcttagcctgggctgtagctatgataaaccggcaggagattggtggacctcgctcttataccatcgcagttgcttccctgggtaaaggagtggcctgtaatcctgcctgcttcatcacacagctcctccctgtgaaaaggaagctagggttctatgaatggacttcaaggttaagaagtcacataaatcccacaggcactgttttgcttcagctagaaaatacaatgcagatgtcattaaaagacttactttaa

SEQ ID NO: 10 - DNA, 1290 bp, synthetic construct
  misc_feature 1..1290: note = GLA codon-optimized
  source 1..1290: mol_type = other DNA
atgcagctgagaaatcctgaactgcacctgggctgtgccctggctctgagatttctggctctggtgtcctgggacattcctggcgctagagccctggataatggcctggccagaacacctacaatgggctggctgcactgggagagattcatgtgcaacctggactgccaagaggaacccgacagctgcatcagcgagaagctgttcatggaaatggccgagctgatggtgtccgaaggctggaaggatgccggctacgagtacctgtgcatcgacgattgctggatggcccctcagagagattctgagggcagactgcaggccgatcctcagagatttcctcacggaatccggcagctggccaactacgtgcactctaagggactgaagctgggcatctacgccgacgtgggcaacaagacatgtgccggctttccaggcagcttcggctactacgatatcgacgcccagacctttgccgattggggcgtcgacctgctgaagttcgatggctgctactgcgacagcctggaaaacctggccgacggctacaaacacatgtctctggccctgaaccggaccggcagatctatcgtgtactcttgcgagtggcccctgtacatgtggcccttccagaagcctaactacaccgagatcagacagtactgcaaccactggcggaacttcgccgacatcgatgacagctggaagtccatcaagagcatcctggactggaccagcttcaatcaagagcggatcgtggatgtggctggcccaggcggatggaacgatcctgatatgctggtcatcggcaacttcggcctgagctggaatcagcaagtgacccagatggccctgtgggccattatggccgctcctctgttcatgagcaacgacctgagacacatcagccctcaggccaaggctctgctgcaggataaggacgtgatcgccatcaaccaggatcctctgggcaagcagggctatcagctgagacagggcgacaatttcgaagtgtgggaaagacctctgagcggcctggcttgggccgtcgccatgatcaatagacaagagatcggcggaccccggtcctatacaattgccgtggcttctctcggaaaaggcgtggcctgcaatcctgcctgctttatcacacagctgctccccgtgaagagaaagctgggcttttacgagtggaccagcagactgagatcccacatcaaccccacaggcactgttctgctgcaactggaaaacacaatgcagatgagcctgaaggacctgctgtag

SEQ ID NO: 11 - protein, 429 aa, synthetic construct
  REGION 1..429: note = GLA
MQLRNPELHLGCALALRFLALVSWDIPGARALDNGLARTPTMGWLHWERFMCNLDCQEEPDSCISEKLFMEMAELMVSEGWKDAGYEYLCIDDCWMAPQRDSEGRLQADPQRFPHGIRQLANYVHSKGLKLGIYADVGNKTCAGFPGSFGYYDIDAQTFADWGVDLLKFDGCYCDSLENLADGYKHMSLALNRTGRSIVYSCEWPLYMWPFQKPNYTEIRQYCNHWRNFADIDDSWKSIKSILDWTSFNQERIVDVAGPGGWNDPDMLVIGNFGLSWNQQVTQMALWAIMAAPLFMSNDLRHISPQAKALLQDKDVIAINQDPLGKQGYQLRQGDNFEVWERPLSGLAWAVAMINRQEIGGPRSYTIAVASLGKGVACNPACFITQLLPVKRKLGFYEWTSRLRSHINPTGTVLLQLENTMQMSLKDLL

SEQ ID NO: 12 - DNA, 1317 bp, synthetic construct
  misc_feature 1..1317: note = CLN3
  source 1..1317: mol_type = other DNA
atgggaggctgtgcaggctcgcggcggcgcttttcggattccgagggggaggagaccgtcccggagccccggctccctctgttggaccatcagggcgcgcattggaagaacgcggtgggcttctggctgctgggcctttgcaacaacttctcttatgtggtgatgctgagtgccgcccacgacatccttagccacaagaggacatcgggaaaccagagccatgtggacccaggcccaacgccgatcccccacaacagctcatcacgatttgactgcaactctgtctctacggctgctgtgctcctggcggacatcctccccacactcgtcatcaaattgttggctcctcttggccttcacctgctgccctacagcccccgggttctcgtcagtgggatttgtgctgctggaagcttcgtcctggttgccttttctcattctgtggggaccagcctgtgtggtgtggtcttcgctagcatctcatcaggccttggggaggtcaccttcctctccctcactgccttctaccccagggccgtgatctcctggtggtcctcagggactgggggagctgggctgctgggggccctgtcctacctgggcctcacccaggccggcctctcccctcagcagaccctgctgtccatgctgggtatccctgccctgctgctggccagctatttcttgttgctcacatctcctgaggcccaggaccctggaggggaagaagaagcagagagcgcagcccggcagcccctcataagaaccgaggccccggagtcgaagccaggctccagctccagcctctcccttcgggaaaggtggacagtgttcaagggtctgctgtggtacattgttcccttggtcgtagtttactttgccgagtatttcattaaccagggactttttgaactcctctttttctggaacacttccctgagtcacgctcagcaataccgctggtaccagatgctgtaccaggctggcgtctttgcctcccgctcttctctccgctgctgtcgcatccgtttcacctgggccctggccctgctgcagtgcctcaacctggtgttcctgctggcagacgtgtggttcggctttctgccaagcatctacctcgtcttcctgatcattctgtatgaggggctcctgggaggcgcagcctacgtgaacaccttccacaacatcgccctggagaccagtgatgagcaccgggagtttgcaatggcggccacctgcatctctgacacactggggatctccctgtcggggctcctggctttgcctctgcatgacttcctctgccagctctcctga

SEQ ID NO: 13 - DNA, 1317 bp, synthetic construct
  misc_feature 1..1317: note = CLN3 codon-optimized
  source 1..1317: mol_type = other DNA
atgggaggatgtgctgggtcaagaagacggtttagcgattccgaaggagaggagactgtgcctgagccaagactgcccctgctggatcaccagggagcacactggaagaacgcagtgggattctggctgctgggcctgtgcaacaacttcagctacgtggtcatgctgtccgccgcccacgacatcctgtcccacaagcggacctccggcaatcagtctcacgtggaccccggccctacaccaatcccccacaacagcagcagccggttcgactgtaattccgtgtctaccgcagccgtgctgctggcagacatcctgcccaccctggtcatcaagctgctggcaccactgggcctgcacctgctgccttattctccaagggtgctggtgagcggcatctgcgcagcaggcagcttcgtgctggtggcctttagccactccgtgggcacctctctgtgcggagtggtgtttgcaagcatcagctccggcctgggagaggtgaccttcctgagcctgacagccttttaccctcgcgccgtgatctcctggtggtctagcggcacaggaggagcaggcctgctgggcgccctgtcctatctgggcctgacccaggcaggcctgtccccacagcagacactgctgtctatgctgggcatccctgccctgctgctggcaagctacttcctgctgctgacctccccagaggcacaggaccccggaggagaggaggaggccgagagcgccgcaaggcagccactgatcaggaccgaggcaccagagtccaagcctggctcctctagctccctgtctctgcgggagagatggacagtgttcaagggcctgctgtggtacatcgtgcccctggtggtggtgtacttcgccgagtacttcatcaaccagggcctgtttgagctgctgttcttttggaatacctctctgagccacgcccagcagtaccggtggtatcagatgctgtatcaggcaggcgtgttcgcctcccggtctagcctgagatgctgtcggatcagattcacctgggcactggccctgctgcagtgcctgaacctggtgttcctgctggccgacgtgtggttcggctttctgccctctatctacctggtgtttctgatcatcctgtatgagggcctgctgggaggagcagcctatgtgaacaccttccacaatatcgccctggagacatctgacgagcacagagagtttgctatggccgccacctgtatcagcgatacactgggcatctctctgagcggactgctggctctgcctctgcatgactttctgtgccagctgagttaa

SEQ ID NO: 14 - protein, 438 aa, Homo sapiens
  REGION 1..438: note = Ceroid Lipofuscinosis, Neuronal 3 (CLN3)
MGGCAGSRRRFSDSEGEETVPEPRLPLLDHQGAHWKNAVGFWLLGLCNNFSYVVMLSAAHDILSHKRTSGNQSHVDPGPTPIPHNSSSRFDCNSVSTAAVLLADILPTLVIKLLAPLGLHLLPYSPRVLVSGICAAGSFVLVAFSHSVGTSLCGVVFASISSGLGEVTFLSLTAFYPRAVISWWSSGTGGAGLLGALSYLGLTQAGLSPQQTLLSMLGIPALLLASYFLLLTSPEAQDPGGEEEAESAARQPLIRTEAPESKPGSSSSLSLRERWTVFKGLLWYIVPLVVVYFAEYFINQGLFELLFFWNTSLSHAQQYRWYQMLYQAGVFASRSSLRCCRIRFTWALALLQCLNLVFLLADVWFGFLPSIYLVFLIILYEGLLGGAAYVNTFHNIALETSDEHREFAMAATCISDTLGISLSGLLALPLHDFLCQLS

SEQ ID NO: 15 - DNA, 2211 bp, synthetic construct
  misc_feature 1..2211: note = AAV204 VP1
  source 1..2211: mol_type = other DNA
atggctgccgatggttatcttccagattggctcgaggacaacctctctgagggcattcgcgagtggtgggacttgaaacctggagccccgaagcccaaagccaaccagcaaaagcaggacgacggccggggtctggtgcttcctggctacaagtacctcggacccttcaacggactcgacaagggggagcccgtcaacgcggcggacgcagcggccctcgagcacgacaaggcctacgaccagcagctcaaagcgggtgacaatccgtacctgcggtataaccacgccgacgccgagtttcaggagcgtctgcaagaagatacgtcttttgggggcaacctcgggcgagcagtcttccaggccaagaagcgggttctcgaacctctcggtctggttgaggaaggcgctaagacggctcctggaaagaaacgtccggtagagcagtcaccacaagagccagactcctcctcgggcatcggcaagacaggccagcagcccgctaaaaagagactcaattttggtcagactggcgactcagagtcagtccccgacccacaacctctcggagaacctccagcaacccccgctgctgtgggacctactacaatggcttcaggcggtggcgcaccaatggcggacaataacgaaggcgccgacggagtgggtaatgcctcaggaaattggcattgcgattccacatggctgggcgacagagtcatcaccaccagcacccgaacatgggccttgcccacctataacaaccacctctacaagcaaatctccagtgcttcaacgggggccagcaacgacaaccactacttcggctacagcaccccctgggggtattttgatttcaacagattccactgccatttctcaccacgtgactggcagcgactcatcaacaacaattggggattccggcccaagagactcaacttcaagctcttcaacatccaagtcaaggaggtcacgacgaatgatggcgtcacgaccatcgctaataaccttaccagcacggttcaagtcttctcggactcggagtaccagttgccgtacgtcctcggctctgcgcaccagggctgcctccctccgttcccggcggacgtgttcatgattccgcagtacggctacctaacgctcaacaatggcagccaggcagtgggacggtcatccttttactgcctggaatatttcccatcgcagatgctgagaacgggcaataactttaccttcagctacaccttcgaggacgtgcctttccacagcagctacgcgcacagccagagcctggaccggctgatgaatcctctcatcgaccagtacctgtattacctgaacagaactcagaatcagtccggaagtgcccaaaacaaggacttgctgtttagccgggggtctccagctggcatgtctgttcagcccaaaaactggctacctggaccctgttaccggcagcagcgcgtttctaaaacaaaaacagacaacaacaacagcaactttacctggacaggtgcttcaaaatataaccttaatgggcgtgaatctataatcaaccctggcactgctatggcctcacacaaagacgacaaagacaagttctttcccatgagcggtgtcatgatttttggaaaggagagcgccggagcttcaaacactgcattggacaatgtcatgatcacagacgaagaggaaatcaaagccactaaccccgtggccaccgaaagatttgggactgtggcagtcaatctccagaacagcagcacagaccctgcgaccggagatgtgcatgttatgggagccttacctggaatggtgtggcaagacagagacgtatacctgcagggtcctatttgggccaaaattcctcacacggatggacactttcacccgtctcctctcatgggcggctttggacttaagcacccgcctcctcagatcctcatcaaaaacacgcctgttcctgcgaatcctccggcagagttttcggctacaaagtttgcttcattcatcacccagtattccacaggacaagtgagcgtggagattgaatgggagctgcagaaagaaaacagcaaacgctggaatcccgaagtgcagtatacatctaactatgcaaaatctgccaacgttgatttcactgtagacaacaatggactttatactgagcctcgccccattggcacccgttacctcacccgtcccctgtaa

SEQ ID NO: 16 - DNA, 1605 bp, synthetic construct
  misc_feature 1..1605: note = AAV204 VP3
  source 1..1605: mol_type = other DNA
atggcttcaggcggtggcgcaccaatggcggacaataacgaaggcgccgacggagtgggtaatgcctcaggaaattggcattgcgattccacatggctgggcgacagagtcatcaccaccagcacccgaacatgggccttgcccacctataacaaccacctctacaagcaaatctccagtgcttcaacgggggccagcaacgacaaccactacttcggctacagcaccccctgggggtattttgatttcaacagattccactgccatttctcaccacgtgactggcagcgactcatcaacaacaattggggattccggcccaagagactcaacttcaagctcttcaacatccaagtcaaggaggtcacgacgaatgatggcgtcacgaccatcgctaataaccttaccagcacggttcaagtcttctcggactcggagtaccagttgccgtacgtcctcggctctgcgcaccagggctgcctccctccgttcccggcggacgtgttcatgattccgcagtacggctacctaacgctcaacaatggcagccaggcagtgggacggtcatccttttactgcctggaatatttcccatcgcagatgctgagaacgggcaataactttaccttcagctacaccttcgaggacgtgcctttccacagcagctacgcgcacagccagagcctggaccggctgatgaatcctctcatcgaccagtacctgtattacctgaacagaactcagaatcagtccggaagtgcccaaaacaaggacttgctgtttagccgggggtctccagctggcatgtctgttcagcccaaaaactggctacctggaccctgttaccggcagcagcgcgtttctaaaacaaaaacagacaacaacaacagcaactttacctggacaggtgcttcaaaatataaccttaatgggcgtgaatctataatcaaccctggcactgctatggcctcacacaaagacgacaaagacaagttctttcccatgagcggtgtcatgatttttggaaaggagagcgccggagcttcaaacactgcattggacaatgtcatgatcacagacgaagaggaaatcaaagccactaaccccgtggccaccgaaagatttgggactgtggcagtcaatctccagaacagcagcacagaccctgcgaccggagatgtgcatgttatgggagccttacctggaatggtgtggcaagacagagacgtatacctgcagggtcctatttgggccaaaattcctcacacggatggacactttcacccgtctcctctcatgggcggctttggacttaagcacccgcctcctcagatcctcatcaaaaacacgcctgttcctgcgaatcctccggcagagttttcggctacaaagtttgcttcattcatcacccagtattccacaggacaagtgagcgtggagattgaatgggagctgcagaaagaaaacagcaaacgctggaatcccgaagtgcagtatacatctaactatgcaaaatctgccaacgttgatttcactgtagacaacaatggactttatactgagcctcgccccattggcacccgttacctcacccgtcccctgtaa

SEQ ID NO: 17 - protein, 534 aa, synthetic construct
  REGION 1..534: note = AAV204 VP3
MASGGGAPMADNNEGADGVGNASGNWHCDSTWLGDRVITTSTRTWALPTYNNHLYKQISSASTGASNDNHYFGYSTPWGYFDFNRFHCHFSPRDWQRLINNNWGFRPKRLNFKLFNIQVKEVTTNDGVTTIANNLTSTVQVFSDSEYQLPYVLGSAHQGCLPPFPADVFMIPQYGYLTLNNGSQAVGRSSFYCLEYFPSQMLRTGNNFTFSYTFEDVPFHSSYAHSQSLDRLMNPLIDQYLYYLNRTQNQSGSAQNKDLLFSRGSPAGMSVQPKNWLPGPCYRQQRVSKTKTDNNNSNFTWTGASKYNLNGRESIINPGTAMASHKDDKDKFFPMSGVMIFGKESAGASNTALDNVMITDEEEIKATNPVATERFGTVAVNLQNSSTDPATGDVHVMGALPGMVWQDRDVYLQGPIWAKIPHTDGHFHPSPLMGGFGLKHPPPQILIKNTPVPANPPAEFSATKFASFITQYSTGQVSVEIEWELQKENSKRWNPEVQYTSNYAKSANVDFTVDNNGLYTEPRPIGTRYLTRPL

SEQ ID NO: 18 - DNA, 2208 bp, synthetic construct
  misc_feature 1..2208: note = ITB102 214 (AAV214) VP1
  source 1..2208: mol_type = other DNA
atggctgccgatggttatcttccagattggctcgaggacaacctctctgagggcattcgcgagtggtgggcgctgaaacctggagccccgaagcccaaagccaaccagcaaaagcaggacgacggccggggtctggtgcttcctggctacaagtacctcggacccttcaacggactcgacaagggggagcccgtcaacgcggcggacgcagcggccctcgagcacgacaaggcctacgaccagcagctcaaagcgggtgacaatccgtacctgcggtataaccacgccgacgccgagtttcaggagcgtctgcaagaagatacgtcttttgggggcaacctcgggcgagcagtcttccaggccaagaagcgggttctcgaaccttttggtctggttgaggaaggtgctaagacggctcctggaaagaaacgtccggtagagcagtcgccacaagagccagactcctcctcgggcatcggcaagacaggccagcagcccgctaaaaagagactcaattttggtcagactggcgactcagagtcagtccccgacccacaacctctcggagaacctccagcaacccccgctgctgtgggacctactacaatggcttcaggcggtggcgcaccaatggcggacaataacgaaggcgccgacggagtgggtaatgcctcaggaaattggcattgcgattccacatggctgggcgacagagtcatcaccaccagcacccgcacctgggccttgcccacctacaataaccacctctacaagcaaatctccagtgcttcaacgggggccagcaacgacaaccactacttcggctacagcaccccctgggggtattttgacttcaacagattccactgccacttttcaccacgtgactggcaaagactcatcaacaacaactggggattccgacccaagagactcaacttcaagctctttaacattcaagtcaaagaggttacggacaacaatggagtcaagaccatcgccaataaccttaccagcacggtccaggtcttcacggactcagactatcagctcccgtacgtcctcggctctgcgcaccagggctgcctccctccgttcccggcggacgtgttcatgattccgcagtacggctacctaacgctcaacgacggcagccaggcagtgggacggtcatccttttactgcctggaatatttcccatcgcagatgctgagaacgggcaacaactttaccttcagctacacctttgaggacgttcctttccacagcagctacgctcacagccagagtctggaccgtctcatgaatcctctgattgaccagtacctgtactacttgtctaagactatcaacggatccggccagaatcagcagactctgaagttcagccaaggtgggcctaatacaatggccaatcaggcaaagaactggctgccaggaccctgttaccgccaacaacgcgtctcaacgacaaccgggcaaaacaacaatagcaactttgcctggactgctgggaccaaataccatctgaatggaagaaattcattgatgaatcctggccccgctatggcatcccacaaagagggcgaggaccgtttttttcccctgtccgggtccctgatttttggcaaacaaaatgctgccagagacaatgcggattacagcgatgtcatgctcaccagcgaggaagaaatcaaaaccactaaccctgtggctacagaggaatacggtatcgtggcagataacttgcagcagcaaaacacggctcctcaaattggaactgtcaacagccagggggccttacccggtatggtctggcagaaccgggacgtgtacctgcagggtcccatctgggccaagattcctcacacggacggcaacttccacccgtctccgctgatgggcggctttggcctgaaacatcctccgcctcagatcctgatcaagaacacgcctgtacctgcggatcctccgaccaccttcaaccagtcaaagctgaactctttcatcacgcaatacagcaccggacaggtcagcgtggaaattgaatgggagctgcagaaggaaaacagcaagcgctggaaccccgagatccagtacacctccaactactacaaatctacaagtgtggactttgctgttaatacagaaggcgtgtactctgaaccccaccccattggcacccgttacctcacccgtcccctgtaa

SEQ ID NO: 19 - DNA, 2211 bp, synthetic construct
  misc_feature 1..2211: note = AAV214-A VP1
  source 1..2211: mol_type = other DNA
atggctgccgatggttatcttccagattggctcgaggacaacctctctgagggcattcgcgagtggtgggcgctgaaacctggagccccgaagcccaaagccaaccagcaaaagcaggacgacggccggggtctggtgcttcctggctacaagtacctcggacccttcaacggactcgacaagggggagcccgtcaacgcggcggacgcagcggccctcgagcacgacaaggcctacgaccagcagctcaaagcgggtgacaatccgtacctgcggtataaccacgccgacgccgagtttcaggagcgtctgcaagaagatacgtcttttgggggcaacctcgggcgagcagtcttccaggccaagaagcgggttctcgaaccttttggtctggttgaggaaggtgctaagacggctcctggaaagaaacgtccggtagagcagtcgccacaagagccagactcctcctcgggcatcggcaagacaggccagcagcccgctaaaaagagactcaattttggtcagactggcgactcagagtcagtccccgacccacaacctctcggagaacctccagcaacccccgctgctgtgggacctactacaatggcttcaggcggtggcgcaccaatggcggacaataacgaaggcgccgacggagtgggtaatgcctcaggaaattggcattgcgattccacatggctgggcgacagagtcatcaccaccagcacccgcacctgggccttgcccacctacaataaccacctctacaagcaaatctccaacagcacatctggaggatcttcaaatgacaacgcctacttcggctacagcaccccctgggggtattttgacttcaacagattccactgccacttttcaccacgtgactggcaaagactcatcaacaacaactggggattccgacccaagagactcaacttcaagctctttaacattcaagtcaaagaggttacggacaacaatggagtcaagaccatcgccaataaccttaccagcacggtccaggtcttcacggactcagactatcagctcccgtacgtcctcggctctgcgcaccagggctgcctccctccgttcccggcggacgtgttcatgattccgcagtacggctacctaacgctcaacgacggcagccaggcagtgggacggtcatccttttactgcctggaatatttcccatcgcagatgctgagaacgggcaacaactttaccttcagctacacctttgaggacgttcctttccacagcagctacgctcacagccagagtctggaccgtctcatgaatcctctgattgaccagtacctgtactacttgtctaagactatcaacggatccggccagaatcagcagactctgaagttcagccaaggtgggcctaatacaatggccaatcaggcaaagaactggctgccaggaccctgttaccgccaacaacgcgtctcaacgacaaccgggcaaaacaacaatagcaactttgcctggactgctgggaccaaataccatctgaatggaagaaattcattgatgaatcctggccccgctatggcatcccacaaagagggcgaggaccgtttttttcccctgtccgggtccctgatttttggcaaacaaaatgctgccagagacaatgcggattacagcgatgtcatgctcaccagcgaggaagaaatcaaaaccactaaccctgtggctacagaggaatacggtatcgtggcagataacttgcagcagcaaaacacggctcctcaaattggaactgtcaacagccagggggccttacccggtatggtctggcagaaccgggacgtgtacctgcagggtcccatctgggccaagattcctcacacggacggcaacttccacccgtctccgctgatgggcggctttggcctgaaacatcctccgcctcagatcctgatcaagaacacgcctgtacctgcggatcctccgaccaccttcaaccagtcaaagctgaactctttcatcacgcaatacagcaccggacaggtcagcgtggaaattgaatgggagctgcagaaggaaaacagcaagcgctggaaccccgagatccagtacacctccaactactacaaatctacaagtgtggactttgctgttaatacagaaggcgtgtactctgaaccccaccccattggcacccgttacctcacccgtcccctgtaa

SEQ ID NO: 20 - DNA, 2211 bp, synthetic construct
  misc_feature 1..2211: note = AAV214e VP1
  source 1..2211: mol_type = other DNA
atggctgccgatggttatcttccagattggctcgaggacaacctctctgagggcattcgcgagtggtgggacttgaaacctggagccccgaaacccaaagccaaccagcaaaagcaggacgacggccggggtctggtgcttcctggctacaagtacctcggacccttcaacggactcgacaagggggagcccgtcaacgcggcggatgcagcggccctcgagcacgacaaggcctacgaccagcagctcaaagcgggtgacaatccgtacctgcggtataaccacgccgacgccgagtttcaggagcgtctgcaagaagatacgtcttttgggggcaacctcgggcgagcagtcttccaggccaagaagcgggttctcgaacctctcggtctggttgaggaaggcgctaagacggctcctggaaagaagagaccggtagagccatcaccccagcgttctccagactcctctacgggcatcggcaagaaaggccaacagcccgccagaaaaagactcaattttggtcagactggcgactcagagtcagtccccgacccacaacctctcggagaacctccagcaacccccgctgctgtgggacctactacaatggcttcaggcggtggcgcaccaatggcagacaataacgaaggcgccgacggagtgggtaatgcctcaggaaattggcattgcgattccacatggctgggcgacagagtcatcaccaccagcacccgcacctgggccttgcccacctacaataaccacctctacaagcaaatctccagtgcttcaacgggggccagcaacgacaaccactacttcggctacagcaccccctgggggtattttgacttcaacagattccactgccacttttcaccacgtgactggcaaagactcatcaacaacaactggggattccgacccaagagactcaacttcaagctctttaacattcaagtcaaagaggttacggacaacaatggagtcaagaccatcgccaataaccttaccagcacggtccaggtcttcacggactcagactatcagctcccgtacgtcctcggctctgcgcaccagggctgcctccctccgttcccggcggacgtgttcatgattccgcagtacggctacctaacgctcaacgacggcagccaggcagtgggacggtcatccttttactgcctggaatatttcccatcgcagatgctgagaacgggcaacaactttaccttcagctacacctttgaggacgttcctttccacagcagctacgctcacagccagagtctggaccgtctcatgaatcctctgattgaccagtacctgtactacttgtctaagactatcaacggatccggccagaatcagcagactctgaagttcagccaaggtgggcctaatacaatggccaatcaggcaaagaactggctgccaggaccctgttaccgccaacaacgcgtctcaacgacaaccgggcaaaacaacaatagcaactttgcctggactgctgggaccaaataccatctgaatggaagaaattcattgatgaatcctggccccgctatggcatcccacaaagagggcgaggaccgtttttttcccctgtccgggtccctgatttttggcaaacaaaatgctgccagagacaatgcggattacagcgatgtcatgctcaccagcgaggaagaaatcaaaaccactaaccctgtggctacagaggaatacggtatcgtggcagataacttgcagcagcaaaacacggctcctcaaattggaactgtcaacagccagggggccttacccggtatggtctggcagaaccgggacgtgtacctgcagggtcccatctgggccaagattcctcacacggacggcaacttccacccgtctccgctgatgggcggctttggcctgaaacatcctccgcctcagatcctgatcaagaacacgcctgtacctgcggatcctccgaccaccttcaaccagtcaaagctgaactctttcatcacgcaatacagcaccggacaggtcagcgtggaaattgaatgggagctgcagaaggaaaacagcaagcgctggaaccccgagatccagtacacctccaactactacaaatctacaagtgtggactttgctgttaatacagaaggcgtgtactctgaaccccaccccattggcacccgttacctcacccgtcccctgtaa

SEQ ID NO: 21 - DNA, 2211 bp, synthetic construct
  misc_feature 1..2211: note = AAV214e8 VP1
  source 1..2211: mol_type = other DNA
atggctgccgatggttatcttccagattggctcgaggacaacctctctgagggcattcgcgagtggtgggcgctgaaacctggagccccgaagcccaaagccaaccagcaaaagcaggacgacggccggggtctggtgcttcctggctacaagtacctcggacccttcaacggactcgacaagggggagcccgtcaacgcggcggacgcagcggccctcgagcacgacaaggcctacgaccagcagctgcaggcgggtgacaatccgtacctgcggtataaccacgccgacgccgagtttcaggagcgtctgcaagaagatacgtcttttgggggcaacctcgggcgagcagtcttccaggccaagaagcgggttctcgaacctctcggtctggttgaggaaggcgctaagacggctcctggaaagaagagaccggtagagccatcaccccagcgttctccagactcctctacgggcatcggcaagaaaggccaacagcccgccagaaaaagactcaattttggtcagactggcgactcagagtcagttccagaccctcaacctctcggagaacctccagcagcgccctctggtgtgggacctaatacaatggcttcaggcggtggcgcaccaatggcggacaataacgaaggcgccgacggagtgggtaatgcctcaggaaattggcattgcgattccacatggctgggcgacagagtcatcaccaccagcacccgcacctgggccttgcccacctacaataaccacctctacaagcaaatctccagtgcttcaacgggggccagcaacgacaaccactacttcggctacagcaccccctgggggtattttgacttcaacagattccactgccacttttcaccacgtgactggcaaagactcatcaacaacaactggggattccgacccaagagactcaacttcaagctctttaacattcaagtcaaagaggttacggacaacaatggagtcaagaccatcgccaataaccttaccagcacggtccaggtcttcacggactcagactatcagctcccgtacgtcctcggctctgcgcaccagggctgcctccctccgttcccggcggacgtgttcatgattccgcagtacggctacctaacgctcaacgacggcagccaggcagtgggacggtcatccttttactgcctggaatatttcccatcgcagatgctgagaacgggcaacaactttaccttcagctacacctttgaggacgttcctttccacagcagctacgctcacagccagagtctggaccgtctcatgaatcctctgattgaccagtacctgtactacttgtctaagactatcaacggatccggccagaatcagcagactctgaagttcagccaaggtgggcctaatacaatggccaatcaggcaaagaactggctgccaggaccctgttaccgccaacaacgcgtctcaacgacaaccgggcaaaacaacaatagcaactttgcctggactgctgggaccaaataccatctgaatggaagaaattcattgatgaatcctggccccgctatggcatcccacaaagagggcgaggaccgtttttttcccctgtccgggtccctgatttttggcaaacaaaatgctgccagagacaatgcggattacagcgatgtcatgctcaccagcgaggaagaaatcaaaaccactaaccctgtggctacagaggaatacggtatcgtggcagataacttgcagcagcaaaacacggctcctcaaattggaactgtcaacagccagggggccttacccggtatggtctggcagaaccgggacgtgtacctgcagggtcccatctgggccaagattcctcacacggacggcaacttccacccgtctccgctgatgggcggctttggcctgaaacatcctccgcctcagatcctgatcaagaacacgcctgtacctgcggatcctccgaccaccttcaaccagtcaaagctgaactctttcatcacgcaatacagcaccggacaggtcagcgtggaaattgaatgggagctgcagaaggaaaacagcaagcgctggaaccccgagatccagtacacctccaactactacaaatctacaagtgtggactttgctgttaatacagaaggcgtgtactctgaaccccaccccattggcacccgttacctcacccgtcccctgtaa

SEQ ID NO: 22 - DNA, 2208 bp, synthetic construct
  misc_feature 1..2208: note = AAV214e9 VP1
  source 1..2208: mol_type = other DNA
atggctgccgatggttatcttccagattggctcgaggacaaccttagtgaaggaattcgcgagtggtgggctttgaaacctggagcccctcaacccaaggcaaatcaacaacatcaagacaacgctcgaggtcttgtgcttccgggttacaaataccttggacccggcaacggactcgacaagggggagccggtcaacgcagcagacgcggcggccctcgagcacgacaaggcctacgaccagcagctcaaggccggagacaacccgtacctcaagtacaaccacgccgacgccgagttccaggagcggctcaaagaagatacgtcttttgggggcaacctcgggcgagcagtcttccaggccaaaaagaggcttcttgaacctcttggtctggttgaggaagcggctaagacggctcctggaaagaagaggcctgtagagcagtctccccaggaaccggactcctccgcgggtattggcaaatcgggtgcacagcccgctaaaaagagactcaatttcggtcagactggcgacacagagtcagtcccagaccctcaaccaatcggagaacctcccgcagccccctctggtgtgggatctcttacaatggcttcaggcggtggcgcaccaatggcggacaataacgaaggcgccgacggagtgggtaatgcctcaggaaattggcattgcgattccacatggctgggcgacagagtcatcaccaccagcacccgcacctgggccttgcccacctacaataaccacctctacaagcaaatctccagtgcttcaacgggggccagcaacgacaaccactacttcggctacagcaccccctgggggtattttgacttcaacagattccactgccacttttcaccacgtgactggcaaagactcatcaacaacaactggggattccgacccaagagactcaacttcaagctctttaacattcaagtcaaagaggttacggacaacaatggagtcaagaccatcgccaataaccttaccagcacggtccaggtcttcacggactcagactatcagctcccgtacgtcctcggctctgcgcaccagggctgcctccctccgttcccggcggacgtgttcatgattccgcagtacggctacctaacgctcaacgacggcagccaggcagtgggacggtcatccttttactgcctggaatatttcccatcgcagatgctgagaacgggcaacaactttaccttcagctacacctttgaggacgttcctttccacagcagctacgctcacagccagagtctggaccgtctcatgaatcctctgattgaccagtacctgtactacttgtctaagactatcaacggatccggccagaatcagcagactctgaagttcagccaaggtgggcctaatacaatggccaatcaggcaaagaactggctgccaggaccctgttaccgccaacaacgcgtctcaacgacaaccgggcaaaacaacaatagcaactttgcctggactgctgggaccaaataccatctgaatggaagaaattcattgatgaatcctggccccgctatggcatcccacaaagagggcgaggaccgtttttttcccctgtccgggtccctgatttttggcaaacaaaatgctgccagagacaatgcggattacagcgatgtcatgctcaccagcgaggaagaaatcaaaaccactaaccctgtggctacagaggaatacggtatcgtggcagataacttgcagcagcaaaacacggctcctcaaattggaactgtcaacagccagggggccttacccggtatggtctggcagaaccgggacgtgtacctgcagggtcccatctgggccaagattcctcacacggacggcaacttccacccgtctccgctgatgggcggctttggcctgaaacatcctccgcctcagatcctgatcaagaacacgcctgtacctgcggatcctccgaccaccttcaaccagtcaaagctgaactctttcatcacgcaatacagcaccggacaggtcagcgtggaaattgaatgggagctgcagaaggaaaacagcaagcgctggaaccccgagatccagtacacctccaactactacaaatctacaagtgtggactttgctgttaatacagaaggcgtgtactctgaaccccaccccattggcacccgttacctcacccgtcccctgtaa

SEQ ID NO: 23 - DNA, 2211 bp, synthetic construct
  misc_feature 1..2211: note = AAV214e10 VP1
  source 1..2211: mol_type = other DNA
atggctgccgatggttatcttccagattggctcgaggacaacctctctgagggcattcgcgagtggtgggacttgaaacctggagccccgaaacccaaagccaaccagcaaaagcaggacgacggccggggtctggtgcttcctggctacaagtacctcggacccttcaacggactcgacaagggggagcccgtcaacgcggcggacgcagcggccctcgagcacgacaaggcctacgaccagcagctcaaagcgggtgacaatccgtacctgcggtataaccacgccgacgccgagtttcaggagcgtctgcaagaagatacgtcttttgggggcaacctcgggcgagcagtcttccaggccaagaagcgggttctcgaacctctcggtctggttgaggaaggcgctaagacggctcctggaaagaagagaccggtagagccatcaccccagcgttctccagactcctctacgggcatcggcaagaaaggccagcagcccgcgaaaaagagactcaactttgggcagactggcgactcagagtcagtgcccgaccctcaaccaatcggagaaccccccgcaggcccctctggtctgggatctggtacaatggcttcaggcggtggcgcaccaatggcggacaataacgaaggcgccgacggagtgggtaatgcctcaggaaattggcattgcgattccacatggctgggcgacagagtcatcaccaccagcacccgcacctgggccttgcccacctacaataaccacctctacaagcaaatctccagtgcttcaacgggggccagcaacgacaaccactacttcggctacagcaccccctgggggtattttgacttcaacagattccactgccacttttcaccacgtgactggcaaagactcatcaacaacaactggggattccgacccaagagactcaacttcaagctctttaacattcaagtcaaagaggttacggacaacaatggagtcaagaccatcgccaataaccttaccagcacggtccaggtcttcacggactcagactatcagctcccgtacgtcctcggctctgcgcaccagggctgcctccctccgttcccggcggacgtgttcatgattccgcagtacggctacctaacgctcaacgacggcagccaggcagtgggacggtcatccttttactgcctggaatatttcccatcgcagatgctgagaacgggcaacaactttaccttcagctacacctttgaggacgttcctttccacagcagctacgctcacagccagagtctggaccgtctcatgaatcctctgattgaccagtacctgtactacttgtctaagactatcaacggatccggccagaatcagcagactctgaagttcagccaaggtgggcctaatacaatggccaatcaggcaaagaactggctgccaggaccctgttaccgccaacaacgcgtctcaacgacaaccgggcaaaacaacaatagcaactttgcctggactgctgggaccaaataccatctgaatggaagaaattcattgatgaatcctggccccgctatggcatcccacaaagagggcgaggaccgtttttttcccctgtccgggtccctgatttttggcaaacaaaatgctgccagagacaatgcggattacagcgatgtcatgctcaccagcgaggaagaaatcaaaaccactaaccctgtggctacagaggaatacggtatcgtggcagataacttgcagcagcaaaacacggctcctcaaattggaactgtcaacagccagggggccttacccggtatggtctggcagaaccgggacgtgtacctgcagggtcccatctgggccaagattcctcacacggacggcaacttccacccgtctccgctgatgggcggctttggcctgaaacatcctccgcctcagatcctgatcaagaacacgcctgtacctgcggatcctccgaccaccttcaaccagtcaaagctgaactctttcatcacgcaatacagcaccggacaggtcagcgtggaaattgaatgggagctgcagaaggaaaacagcaagcgctggaaccccgagatccagtacacctccaactactacaaatctacaagtgtggactttgctgttaatacagaaggcgtgtactctgaaccccaccccattggcacccgttacctcacccgtcccctgtaa

SEQ ID NO: 24 - DNA, 1602 bp, synthetic construct
  misc_feature 1..1602: note = ITB102 214 (AAV214) VP3
  source 1..1602: mol_type = other DNA
atggcttcaggcggtggcgcaccaatggcggacaataacgaaggcgccgacggagtgggtaatgcctcaggaaattggcattgcgattccacatggctgggcgacagagtcatcaccaccagcacccgcacctgggccttgcccacctacaataaccacctctacaagcaaatctccagtgcttcaacgggggccagcaacgacaaccactacttcggctacagcaccccctgggggtattttgacttcaacagattccactgccacttttcaccacgtgactggcaaagactcatcaacaacaactggggattccgacccaagagactcaacttcaagctctttaacattcaagtcaaagaggttacggacaacaatggagtcaagaccatcgccaataaccttaccagcacggtccaggtcttcacggactcagactatcagctcccgtacgtcctcggctctgcgcaccagggctgcctccctccgttcccggcggacgtgttcatgattccgcagtacggctacctaacgctcaacgacggcagccaggcagtgggacggtcatccttttactgcctggaatatttcccatcgcagatgctgagaacgggcaacaactttaccttcagctacacctttgaggacgttcctttccacagcagctacgctcacagccagagtctggaccgtctcatgaatcctctgattgaccagtacctgtactacttgtctaagactatcaacggatccggccagaatcagcagactctgaagttcagccaaggtgggcctaatacaatggccaatcaggcaaagaactggctgccaggaccctgttaccgccaacaacgcgtctcaacgacaaccgggcaaaacaacaatagcaactttgcctggactgctgggaccaaataccatctgaatggaagaaattcattgatgaatcctggccccgctatggcatcccacaaagagggcgaggaccgtttttttcccctgtccgggtccctgatttttggcaaacaaaatgctgccagagacaatgcggattacagcgatgtcatgctcaccagcgaggaagaaatcaaaaccactaaccctgtggctacagaggaatacggtatcgtggcagataacttgcagcagcaaaacacggctcctcaaattggaactgtcaacagccagggggccttacccggtatggtctggcagaaccgggacgtgtacctgcagggtcccatctgggccaagattcctcacacggacggcaacttccacccgtctccgctgatgggcggctttggcctgaaacatcctccgcctcagatcctgatcaagaacacgcctgtacctgcggatcctccgaccaccttcaaccagtcaaagctgaactctttcatcacgcaatacagcaccggacaggtcagcgtggaaattgaatgggagctgcagaaggaaaacagcaagcgctggaaccccgagatccagtacacctccaactactacaaatctacaagtgtggactttgctgttaatacagaaggcgtgtactctgaaccccaccccattggcacccgttacctcacccgtcccctgtaa

SEQ ID NO: 25 - DNA, 1605 bp, synthetic construct
  misc_feature 1..1605: note = AAV214-A VP3
  source 1..1605: mol_type = other DNA
atggcttcaggcggtggcgcaccaatggcggacaataacgaaggcgccgacggagtgggtaatgcctcaggaaattggcattgcgattccacatggctgggcgacagagtcatcaccaccagcacccgcacctgggccttgcccacctacaataaccacctctacaagcaaatctccaacagcacatctggaggatcttcaaatgacaacgcctacttcggctacagcaccccctgggggtattttgacttcaacagattccactgccacttttcaccacgtgactggcaaagactcatcaacaacaactggggattccgacccaagagactcaacttcaagctctttaacattcaagtcaaagaggttacggacaacaatggagtcaagaccatcgccaataaccttaccagcacggtccaggtcttcacggactcagactatcagctcccgtacgtcctcggctctgcgcaccagggctgcctccctccgttcccggcggacgtgttcatgattccgcagtacggctacctaacgctcaacgacggcagccaggcagtgggacggtcatccttttactgcctggaatatttcccatcgcagatgctgagaacgggcaacaactttaccttcagctacacctttgaggacgttcctttccacagcagctacgctcacagccagagtctggaccgtctcatgaatcctctgattgaccagtacctgtactacttgtctaagactatcaacggatccggccagaatcagcagactctgaagttcagccaaggtgggcctaatacaatggccaatcaggcaaagaactggctgccaggaccctgttaccgccaacaacgcgtctcaacgacaaccgggcaaaacaacaatagcaactttgcctggactgctgggaccaaataccatctgaatggaagaaattcattgatgaatcctggccccgctatggcatcccacaaagagggcgaggaccgtttttttcccctgtccgggtccctgatttttggcaaacaaaatgctgccagagacaatgcggattacagcgatgtcatgctcaccagcgaggaagaaatcaaaaccactaaccctgtggctacagaggaatacggtatcgtggcagataacttgcagcagcaaaacacggctcctcaaattggaactgtcaacagccagggggccttacccggtatggtctggcagaaccgggacgtgtacctgcagggtcccatctgggccaagattcctcacacggacggcaacttccacccgtctccgctgatgggcggctttggcctgaaacatcctccgcctcagatcctgatcaagaacacgcctgtacctgcggatcctccgaccaccttcaaccagtcaaagctgaactctttcatcacgcaatacagcaccggacaggtcagcgtggaaattgaatgggagctgcagaaggaaaacagcaagcgctggaaccccgagatccagtacacctccaactactacaaatctacaagtgtggactttgctgttaatacagaaggcgtgtactctgaaccccaccccattggcacccgttacctcacccgtcccctgtaa

SEQ ID NO: 26 - DNA, 1602 bp, synthetic construct
  misc_feature 1..1602: note = AAV214e VP3
  source 1..1602: mol_type = other DNA
atggcttcaggcggtggcgcaccaatggcagacaataacgaaggcgccgacggagtgggtaatgcctcaggaaattggcattgcgattccacatggctgggcgacagagtcatcaccaccagcacccgcacctgggccttgcccacctacaataaccacctctacaagcaaatctccagtgcttcaacgggggccagcaacgacaaccactacttcggctacagcaccccctgggggtattttgacttcaacagattccactgccacttttcaccacgtgactggcaaagactcatcaacaacaactggggattccgacccaagagactcaacttcaagctctttaacattcaagtcaaagaggttacggacaacaatggagtcaagaccatcgccaataaccttaccagcacggtccaggtcttcacggactcagactatcagctcccgtacgtcctcggctctgcgcaccagggctgcctccctccgttcccggcggacgtgttcatgattccgcagtacggctacctaacgctcaacgacggcagccaggcagtgggacggtcatccttttactgcctggaatatttcccatcgcagatgctgagaacgggcaacaactttaccttcagctacacctttgaggacgttcctttccacagcagctacgctcacagccagagtctggaccgtctcatgaatcctctgattgaccagtacctgtactacttgtctaagactatcaacggatccggccagaatcagcagactctgaagttcagccaaggtgggcctaatacaatggccaatcaggcaaagaactggctgccaggaccctgttaccgccaacaacgcgtctcaacgacaaccgggcaaaacaacaatagcaactttgcctggactgctgggaccaaataccatctgaatggaagaaattcattgatgaatcctggccccgctatggcatcccacaaagagggcgaggaccgtttttttcccctgtccgggtccctgatttttggcaaacaaaatgctgccagagacaatgcggattacagcgatgtcatgctcaccagcgaggaagaaatcaaaaccactaaccctgtggctacagaggaatacggtatcgtggcagataacttgcagcagcaaaacacggctcctcaaattggaactgtcaacagccagggggccttacccggtatggtctggcagaaccgggacgtgtacctgcagggtcccatctgggccaagattcctcacacggacggcaacttccacccgtctccgctgatgggcggctttggcctgaaacatcctccgcctcagatcctgatcaagaacacgcctgtacctgcggatcctccgaccaccttcaaccagtcaaagctgaactctttcatcacgcaatacagcaccggacaggtcagcgtggaaattgaatgggagctgcagaaggaaaacagcaagcgctggaaccccgagatccagtacacctccaactactacaaatctacaagtgtggactttgctgttaatacagaaggcgtgtactctgaaccccaccccattggcacccgttacctcacccgtcccctgtaa

SEQ ID NO: 27 - DNA, 1602 bp, synthetic construct; identical to SEQ ID NO: 24
  misc_feature 1..1602: note = AAV214e8 VP3
  source 1..1602: mol_type = other DNA

SEQ ID NO: 28 - DNA, 1602 bp, synthetic construct; identical to SEQ ID NO: 24
  misc_feature 1..1602: note = AAV214e9 VP3
  source 1..1602: mol_type = other DNA

SEQ ID NO: 29 - DNA, 1602 bp, synthetic construct; identical to SEQ ID NO: 24
  misc_feature 1..1602: note = AAV214e10 VP3
  source 1..1602: mol_type = other DNA

SEQ ID NO: 30 - protein, 736 aa, synthetic construct
  REGION 1..736: note = AAV214A VP1
MAADGYLPDWLEDNLSEGIREWWALKPGAPKPKANQQKQDDGRGLVLPGYKYLGPFNGLDKGEPVNAADAAALEHDKAYDQQLKAGDNPYLRYNHADAEFQERLQEDTSFGGNLGRAVFQAKKRVLEPFGLVEEGAKTAPGKKRPVEQSPQEPDSSSGIGKTGQQPAKKRLNFGQTGDSESVPDPQPLGEPPATPAAVGPTTMASGGGAPMADNNEGADGVGNASGNWHCDSTWLGDRVITTSTRTWALPTYNNHLYKQISNSTSGGSSNDNAYFGYSTPWGYFDFNRFHCHFSPRDWQRLINNNWGFRPKRLNFKLFNIQVKEVTDNNGVKTIANNLTSTVQVFTDSDYQLPYVLGSAHQGCLPPFPADVFMIPQYGYLTLNDGSQAVGRSSFYCLEYFPSQMLRTGNNFTFSYTFEDVPFHSSYAHSQSLDRLMNPLIDQYLYYLSKTINGSGQNQQTLKFSQGGPNTMANQAKNWLPGPCYRQQRVSTTTGQNNNSNFAWTAGTKYHLNGRNSLMNPGPAMASHKEGEDRFFPLSGSLIFGKQNAARDNADYSDVMLTSEEEIKTTNPVATEEYGIVADNLQQQNTAPQIGTVNSQGALPGMVWQNRDVYLQGPIWAKIPHTDGNFHPSPLMGGFGLKHPPPQILIKNTPVPADPPTTFNQSKLNSFITQYSTGQVSVEIEWELQKENSKRWNPEIQYTSNYYKSTSVDFAVNTEGVYSEPHPIGTRYLTRPL

SEQ ID NO: 31 - protein, 736 aa, synthetic construct
  REGION 1..736: note = AAV214e VP1
MAADGYLPDWLEDNLSEGIREWWDLKPGAPKPKANQQKQDDGRGLVLPGYKYLGPFNGLDKGEPVNAADAAALEHDKAYDQQLKAGDNPYLRYNHADAEFQERLQEDTSFGGNLGRAVFQAKKRVLEPLGLVEEGAKTAPGKKRPVEPSPQRSPDSSTGIGKKGQQPARKRLNFGQTGDSESVPDPQPLGEPPATPAAVGPTTMASGGGAPMADNNEGADGVGNASGNWHCDSTWLGDRVITTSTRTWALPTYNNHLYKQISSASTGASNDNHYFGYSTPWGYFDFNRFHCHFSPRDWQRLINNNWGFRPKRLNFKLFNIQVKEVTDNNGVKTIANNLTSTVQVFTDSDYQLPYVLGSAHQGCLPPFPADVFMIPQYGYLTLNDGSQAVGRSSFYCLEYFPSQMLRTGNNFTFSYTFEDVPFHSSYAHSQSLDRLMNPLIDQYLYYLSKTINGSGQNQQTLKFSQGGPNTMANQAKNWLPGPCYRQQRVSTTTGQNNNSNFAWTAGTKYHLNGRNSLMNPGPAMASHKEGEDRFFPLSGSLIFGKQNAARDNADYSDVMLTSEEEIKTTNPVATEEYGIVADNLQQQNTAPQIGTVNSQGALPGMVWQNRDVYLQGPIWAKIPHTDGNFHPSPLMGGFGLKHPPPQILIKNTPVPADPPTTFNQSKLNSFITQYSTGQVSVEIEWELQKENSKRWNPEIQYTSNYYKSTSVDFAVNTEGVYSEPHPIGTRYLTRPL

SEQ ID NO: 32 - protein, 736 aa, synthetic construct
  REGION 1..736: note = AAV214e8 VP1
MAADGYLPDWLEDNLSEGIREWWALKPGAPKPKANQQKQDDGRGLVLPGYKYLGPFNGLDKGEPVNAADAAALEHDKAYDQQLQAGDNPYLRYNHADAEFQERLQEDTSFGGNLGRAVFQAKKRVLEPLGLVEEGAKTAPGKKRPVEPSPQRSPDSSTGIGKKGQQPARKRLNFGQTGDSESVPDPQPLGEPPAAPSGVGPNTMASGGGAPMADNNEGADGVGNASGNWHCDSTWLGDRVITTSTRTWALPTYNNHLYKQISSASTGASNDNHYFGYSTPWGYFDFNRFHCHFSPRDWQRLINNNWGFRPKRLNFKLFNIQVKEVTDNNGVKTIANNLTSTVQVFTDSDYQLPYVLGSAHQGCLPPFPADVFMIPQYGYLTLNDGSQAVGRSSFYCLEYFPSQMLRTGNNFTFSYTFEDVPFHSSYAHSQSLDRLMNPLIDQYLYYLSKTINGSGQNQQTLKFSQGGPNTMANQAKNWLPGPCYRQQRVSTTTGQNNNSNFAWTAGTKYHLNGRNSLMNPGPAMASHKEGEDRFFPLSGSLIFGKQNAARDNADYSDVMLTSEEEIKTTNPVATEEYGIVADNLQQQNTAPQIGTVNSQGALPGMVWQNRDVYLQGPIWAKIPHTDGNFHPSPLMGGFGLKHPPPQILIKNTPVPADPPTTFNQSKLNSFITQYSTGQVSVEIEWELQKENSKRWNPEIQYTSNYYKSTSVDFAVNTEGVYSEPHPIGTRYLTRPL

SEQ ID NO: 33 - protein, 735 aa, synthetic construct
  REGION 1..735: note = AAV214e9 VP1
MAADGYLPDWLEDNLSEGIREWWALKPGAPQPKANQQHQDNARGLVLPGYKYLGPGNGLDKGEPVNAADAAALEHDKAYDQQLKAGDNPYLKYNHADAEFQERLKEDTSFGGNLGRAVFQAKKRLLEPLGLVEEAAKTAPGKKRPVEQSPQEPDSSAGIGKSGAQPAKKRLNFGQTGDTESVPDPQPIGEPPAAPSGVGSLTMASGGGAPMADNNEGADGVGNASGNWHCDSTWLGDRVITTSTRTWALPTYNNHLYKQISSASTGASNDNHYFGYSTPWGYFDFNRFHCHFSPRDWQRLINNNWGFRPKRLNFKLFNIQVKEVTDNNGVKTIANNLTSTVQVFTDSDYQLPYVLGSAHQGCLPPFPADVFMIPQYGYLTLNDGSQAVGRSSFYCLEYFPSQMLRTGNNFTFSYTFEDVPFHSSYAHSQSLDRLMNPLIDQYLYYLSKTINGSGQNQQTLKFSQGGPNTMANQAKNWLPGPCYRQQRVSTTTGQNNNSNFAWTAGTKYHLNGRNSLMNPGPAMASHKEGEDRFFPLSGSLIFGKQNAARDNADYSDVMLTSEEEIKTTNPVATEEYGIVADNLQQQNTAPQIGTVNSQGALPGMVWQNRDVYLQGPIWAKIPHTDGNFHPSPLMGGFGLKHPPPQILIKNTPVPADPPTTFNQSKLNSFITQYSTGQVSVEIEWELQKENSKRWNPEIQYTSNYYKSTSVDFAVNTEGVYSEPHPIGTRYLTRPL

SEQ ID NO: 34 - protein, 736 aa, synthetic construct
  REGION 1..736: note = AAV214e10 VP1
MAADGYLPDWLEDNLSEGIREWWDLKPGAPKPKANQQKQDDGRGLVLPGYKYLGPFNGLDKGEPVNAADAAALEHDKAYDQQLKAGDNPYLRYNHADAEFQERLQEDTSFGGNLGRAVFQAKKRVLEPLGLVEEGAKTAPGKKRPVEPSPQRSPDSSTGIGKKGQQPAKKRLNFGQTGDSESVPDPQPIGEPPAGPSGLGSGTMASGGGAPMADNNEGADGVGNASGNWHCDSTWLGDRVITTSTRTWALPTYNNHLYKQISSASTGASNDNHYFGYSTPWGYFDFNRFHCHFSPRDWQRLINNNWGFRPKRLNFKLFNIQVKEVTDNNGVKTIANNLTSTVQVFTDSDYQLPYVLGSAHQGCLPPFPADVFMIPQYGYLTLNDGSQAVGRSSFYCLEYFPSQMLRTGNNFTFSYTFEDVPFHSSYAHSQSLDRLMNPLIDQYLYYLSKTINGSGQNQQTLKFSQGGPNTMANQAKNWLPGPCYRQQRVSTTTGQNNNSNFAWTAGTKYHLNGRNSLMNPGPAMASHKEGEDRFFPLSGSLIFGKQNAARDNADYSDVMLTSEEEIKTTNPVATEEYGIVADNLQQQNTAPQIGTVNSQGALPGMVWQNRDVYLQGPIWAKIPHTDGNFHPSPLMGGFGLKHPPPQILIKNTPVPADPPTTFNQSKLNSFITQYSTGQVSVEIEWELQKENSKRWNPEIQYTSNYYKSTSVDFAVNTEGVYSEPHPIGTRYLTRPL

SEQ ID NO: 35 - protein, 598 aa, synthetic construct
  REGION 1..598: note = AAV214 VP2
MAPGKKRPVEQSPQEPDSSSGIGKTGQQPAKKRLNFGQTGDSESVPDPQPLGEPPATPAAVGPTTMASGGGAPMADNNEGADGVGNASGNWHCDSTWLGDRVITTSTRTWALPTYNNHLYKQISSASTGASNDNHYFGYSTPWGYFDFNRFHCHFSPRDWQRLINNNWGFRPKRLNFKLFNIQVKEVTDNNGVKTIANNLTSTVQVFTDSDYQLPYVLGSAHQGCLPPFPADVFMIPQYGYLTLNDGSQAVGRSSFYCLEYFPSQMLRTGNNFTFSYTFEDVPFHSSYAHSQSLDRLMNPLIDQYLYYLSKTINGSGQNQQTLKFSQGGPNTMANQAKNWLPGPCYRQQRVSTTTGQNNNSNFAWTAGTKYHLNGRNSLMNPGPAMASHKEGEDRFFPLSGSLIFGKQNAARDNADYSDVMLTSEEEIKTTNPVATEEYGIVADNLQQQNTAPQIGTVNSQGALPGMVWQNRDVYLQGPIWAKIPHTDGNFHPSPLMGGFGLKHPPPQILIKNTPVPADPPTTFNQSKLNSFITQYSTGQVSVEIEWELQKENSKRWNPEIQYTSNYYKSTSVDFAVNTEGVYSEPHPIGTRYLTRPL

SEQ ID NO: 36 - protein, 599 aa, synthetic construct
  REGION 1..599: note = AAV214A VP2
MAPGKKRPVEQSPQEPDSSSGIGKTGQQPAKKRLNFGQTGDSESVPDPQPLGEPPATPAAVGPTTMASGGGAPMADNNEGADGVGNASGNWHCDSTWLGDRVITTSTRTWALPTYNNHLYKQISNSTSGGSSNDNAYFGYSTPWGYFDFNRFHCHFSPRDWQRLINNNWGFRPKRLNFKLFNIQVKEVTDNNGVKTIANNLTSTVQVFTDSDYQLPYVLGSAHQGCLPPFPADVFMIPQYGYLTLNDGSQAVGRSSFYCLEYFPSQMLRTGNNFTFSYTFEDVPFHSSYAHSQSLDRLMNPLIDQYLYYLSKTINGSGQNQQTLKFSQGGPNTMANQAKNWLPGPCYRQQRVSTTTGQNNNSNFAWTAGTKYHLNGRNSLMNPGPAMASHKEGEDRFFPLSGSLIFGKQNAARDNADYSDVMLTSEEEIKTTNPVATEEYGIVADNLQQQNTAPQIGTVNSQGALPGMVWQNRDVYLQGPIWAKIPHTDGNFHPSPLMGGFGLKHPPPQILIKNTPVPADPPTTFNQSKLNSFITQYSTGQVSVEIEWELQKENSKRWNPEIQYTSNYYKSTSVDFAVNTEGVYSEPHPIGTRYLTRPL

SEQ ID NO: 37 - protein, 599 aa, synthetic construct
  REGION 1..599: note = AAV214e VP2
MAPGKKRPVEPSPQRSPDSSTGIGKKGQQPARKRLNFGQTGDSESVPDPQPLGEPPATPAAVGPTTMASGGGAPMADNNEGADGVGNASGNWHCDSTWLGDRVITTSTRTWALPTYNNHLYKQISSASTGASNDNHYFGYSTPWGYFDFNRFHCHFSPRDWQRLINNNWGFRPKRLNFKLFNIQVKEVTDNNGVKTIANNLTSTVQVFTDSDYQLPYVLGSAHQGCLPPFPADVFMIPQYGYLTLNDGSQAVGRSSFYCLEYFPSQMLRTGNNFTFSYTFEDVPFHSSYAHSQSLDRLMNPLIDQYLYYLSKTINGSGQNQQTLKFSQGGPNTMANQAKNWLPGPCYRQQRVSTTTGQNNNSNFAWTAGTKYHLNGRNSLMNPGPAMASHKEGEDRFFPLSGSLIFGKQNAARDNADYSDVMLTSEEEIKTTNPVATEEYGIVADNLQQQNTAPQIGTVNSQGALPGMVWQNRDVYLQGPIWAKIPHTDGNFHPSPLMGGFGLKHPPPQILIKNTPVPADPPTTFNQSKLNSFITQYSTGQVSVEIEWELQKENSKRWNPEIQYTSNYYKSTSVDFAVNTEGVYSEPHPIGTRYLTRPL

SEQ ID NO: 38 - protein, 599 aa, synthetic construct
  REGION 1..599: note = AAV214e8 VP2
MAPGKKRPVEPSPQRSPDSSTGIGKKGQQPARKRLNFGQTGDSESVPDPQPLGEPPAAPSGVGPNTMASGGGAPMADNNEGADGVGNASGNWHCDSTWLGDRVITTSTRTWALPTYNNHLYKQISSASTGASNDNHYFGYSTPWGYFDFNRFHCHFSPRDWQRLINNNWGFRPKRLNFKLFNIQVKEVTDNNGVKTIANNLTSTVQVFTDSDYQLPYVLGSAHQGCLPPFPADVFMIPQYGYLTLNDGSQAVGRSSFYCLEYFPSQMLRTGNNFTFSYTFEDVPFHSSYAHSQSLDRLMNPLIDQYLYYLSKTINGSGQNQQTLKFSQGGPNTMANQAKNWLPGPCYRQQRVSTTTGQNNNSNFAWTAGTKYHLNGRNSLMNPGPAMASHKEGEDRFFPLSGSLIFGKQNAARDNADYSDVMLTSEEEIKTTNPVATEEYGIVADNLQQQNTAPQIGTVNSQGALPGMVWQNRDVYLQGPIWAKIPHTDGNFHPSPLMGGFGLKHPPPQILIKNTPVPADPPTTFNQSKLNSFITQYSTGQVSVEIEWELQKENSKRWNPEIQYTSNYYKSTSVDFAVNTEGVYSEPHPIGTRYLTRPL

SEQ ID NO: 39 - protein, 598 aa, synthetic construct
  REGION 1..598: note = AAV214e9 VP2
MAPGKKRPVEQSPQEPDSSAGIGKSGAQPAKKRLNFGQTGDTESVPDPQPIGEPPAAPSGVGSLTMASGGGAPMADNNEGADGVGNASGNWHCDSTWLGDRVITTSTRTWALPTYNNHLYKQISSASTGASNDNHYFGYSTPWGYFDFNRFHCHFSPRDWQRLINNNWGFRPKRLNFKLFNIQVKEVTDNNGVKTIANNLTSTVQVFTDSDYQLPYVLGSAHQGCLPPFPADVFMIPQYGYLTLNDGSQAVGRSSFYCLEYFPSQMLRTGNNFTFSYTFEDVPFHSSYAHSQSLDRLMNPLIDQYLYYLSKTINGSGQNQQTLKFSQGGPNTMANQAKNWLPGPCYRQQRVSTTTGQNNNSNFAWTAGTKYHLNGRNSLMNPGPAMASHKEGEDRFFPLSGSLIFGKQNAARDNADYSDVMLTSEEEIKTTNPVATEEYGIVADNLQQQNTAPQIGTVNSQGALPGMVWQNRDVYLQGPIWAKIPHTDGNFHPSPLMGGFGLKHPPPQILIKNTPVPADPPTTFNQSKLNSFITQYSTGQVSVEIEWELQKENSKRWNPEIQYTSNYYKSTSVDFAVNTEGVYSEPHPIGTRYLTRPL

SEQ ID NO: 40 - protein, 599 aa, synthetic construct
  REGION 1..599: note = AAV214e10 VP2
MAPGKKRPVEPSPQRSPDSSTGIGKKGQQPAKKRLNFGQTGDSESVPDPQPIGEPPAGPSGLGSGTMASGGGAPMADNNEGADGVGNASGNWHCDSTWLGDRVITTSTRTWALPTYNNHLYKQISSASTGASNDNHYFGYSTPWGYFDFNRFHCHFSPRDWQRLINNNWGFRPKRLNFKLFNIQVKEVTDNNGVKTIANNLTSTVQVFTDSDYQLPYVLGSAHQGCLPPFPADVFMIPQYGYLTLNDGSQAVGRSSFYCLEYFPSQMLRTGNNFTFSYTFEDVPFHSSYAHSQSLDRLMNPLIDQYLYYLSKTINGSGQNQQTLKFSQGGPNTMANQAKNWLPGPCYRQQRVSTTTGQNNNSNFAWTAGTKYHLNGRNSLMNPGPAMASHKEGEDRFFPLSGSLIFGKQNAARDNADYSDVMLTSEEEIKTTNPVATEEYGIVADNLQQQNTAPQIGTVNSQGALPGMVWQNRDVYLQGPIWAKIPHTDGNFHPSPLMGGFGLKHPPPQILIKNTPVPADPPTTFNQSKLNSFITQYSTGQVSVEIEWELQKENSKRWNPEIQYTSNYYKSTSVDFAVNTEGVYSEPHPIGTRYLTRPL

SEQ ID NO: 41 - protein, 533 aa, synthetic construct
  REGION 1..533: note = AAV214 VP3
MASGGGAPMADNNEGADGVGNASGNWHCDSTWLGDRVITTSTRTWALPTYNNHLYKQISSASTGASNDNHYFGYSTPWGYFDFNRFHCHFSPRDWQRLINNNWGFRPKRLNFKLFNIQVKEVTDNNGVKTIANNLTSTVQVFTDSDYQLPYVLGSAHQGCLPPFPADVFMIPQYGYLTLNDGSQAVGRSSFYCLEYFPSQMLRTGNNFTFSYTFEDVPFHSSYAHSQSLDRLMNPLIDQYLYYLSKTINGSGQNQQTLKFSQGGPNTMANQAKNWLPGPCYRQQRVSTTTGQNNNSNFAWTAGTKYHLNGRNSLMNPGPAMASHKEGEDRFFPLSGSLIFGKQNAARDNADYSDVMLTSEEEIKTTNPVATEEYGIVADNLQQQNTAPQIGTVNSQGALPGMVWQNRDVYLQGPIWAKIPHTDGNFHPSPLMGGFGLKHPPPQILIKNTPVPADPPTTFNQSKLNSFITQYSTGQVSVEIEWELQKENSKRWNPEIQYTSNYYKSTSVDFAVNTEGVYSEPHPIGTRYLTRPL

SEQ ID NO: 42 - protein, 534 aa, synthetic construct
  REGION 1..534: note = AAV214A VP3
MASGGGAPMADNNEGADGVGNASGNWHCDSTWLGDRVITTSTRTWALPTYNNHLYKQISNSTSGGSSNDNAYFGYSTPWGYFDFNRFHCHFSPRDWQRLINNNWGFRPKRLNFKLFNIQVKEVTDNNGVKTIANNLTSTVQVFTDSDYQLPYVLGSAHQGCLPPFPADVFMIPQYGYLTLNDGSQAVGRSSFYCLEYFPSQMLRTGNNFTFSYTFEDVPFHSSYAHSQSLDRLMNPLIDQYLYYLSKTINGSGQNQQTLKFSQGGPNTMANQAKNWLPGPCYRQQRVSTTTGQNNNSNFAWTAGTKYHLNGRNSLMNPGPAMASHKEGEDRFFPLSGSLIFGKQNAARDNADYSDVMLTSEEEIKTTNPVATEEYGIVADNLQQQNTAPQIGTVNSQGALPGMVWQNRDVYLQGPIWAKIPHTDGNFHPSPLMGGFGLKHPPPQILIKNTPVPADPPTTFNQSKLNSFITQYSTGQVSVEIEWELQKENSKRWNPEIQYTSNYYKSTSVDFAVNTEGVYSEPHPIGTRYLTRPL

SEQ ID NO: 43 - protein, 533 aa, synthetic construct; identical to SEQ ID NO: 41
  REGION 1..533: note = AAV214E VP3

SEQ ID NO: 44 - protein, 533 aa, synthetic construct; identical to SEQ ID NO: 41
  REGION 1..533: note = AAV214E8 VP3

SEQ ID NO: 45 - protein, 533 aa, synthetic construct; identical to SEQ ID NO: 41
  REGION 1..533: note = AAV214E9 VP3

SEQ ID NO: 46 - protein, 533 aa, synthetic construct; identical to SEQ ID NO: 41
  REGION 1..533: note = AAV214E10 VP3

SEQ ID NO: 47 - DNA, 2211 bp, synthetic construct
  misc_feature 1..2211: note = ITB102 45 VP1
  source 1..2211: mol_type = other DNA
atggctgccgatggttatcttccagattggctcgaggacaacctctctgagggcattcgcgagtggtgggcgctgaaacctggagccccgaagcccaaagccaaccagcaaaagcaggacgacggccggggtctggtgcttcctggctacaagtacctcggacccttcaacggactcgacaagggggagcccgtcaacgcggcggacgcagcggccctcgagcacgacaaggcctacgaccagcagctcaaagcgggtgacaatccgtacctgcggtataaccacgccgacgccgagtttcaggagcgtctgcaagaagatacgtcttttgggggcaacctcgggcgagcagtcttccaggccaagaagcgggttctcgaaccttttggtctggttgaggaaggtgctaagacggctcctggaaagaaacgtccggtagagcagtcgccacaagagccagactcctcctcgggcatcggcaagacaggccagcagcccgctaaaaagagactcaattttggtcagactggcgactcagagtcagtccccgacccacaacctctcggagaacctccagcaacccccgctgctgtgggacctactacaatggcttcaggcggtggcgcaccaatggcggacaataacgaaggcgccgacggagtgggtaatgcctcaggaaattggcattgcgattccacatggctgggcgacagagtcatcaccaccagcacccgcacctgggccttgcccacctacaataaccacctctacaagcaaatctccagtgcttcaacgggggccagcaacgacaaccactacttcggctacagcaccccctgggggtattttgacttcaacagattccactgccacttttcaccacgtgactggcaaagactcatcaacaacaactggggattccgacccaagagactcaacttcaagctctttaacattcaagtcaaagaggttacggacaacaatggagtcaagaccatcgccaataaccttaccagcacggtccaggtcttcacggactcagactatcagctcccgtacgtgctcgggtcggctcacgagggctgcctcccgccgttcccagcggacgttttcatgattcctcagtacggctacctaacgctcaacaatggcagccaggcagtgggacggtcatccttttactgcctggaatatttcccatcgcagatgctgagaacgggcaacaactttaccttcagctacacctttgaggacgttcctttccacagcagctacgctcacagccagagtctggaccggctgatgaatcctctgattgaccagtacctgtactacttgtctcggactcaaacaacaggaggcacggcaaatacgcagactctgggcttcagccaaggtgggcctaatacaatggccaatcaggcaaagaactggctgccaggaccctgttaccgccaacaacgcgtctcaacgacaaccgggcaaaacaacaatagcaactttgcctggactgctgggaccaaataccatctgaatggaagaaattcattgatgaatcctggccccgctatggcatcccacaaagagggcgaggaccgtttttttcccctgtccgggtccctgatttttggcaaacaaggcactggcagagacaatgtggatgccgacaaagtcatgatcaccaacgaggaagaaatcaaaaccactaaccctgtggctacagaggaatacggtatcgtggcagataacttgcagcagcaaaacacggctcctcaaattggaactgtcaacagccagggggccttacccggtatggtctggcagaaccgggacgtgtacctgcagggtcccatctgggccaagattcctcacacggacggcaacttccacccgtctccgctgatgggcggctttggcctgaaacatcctccgcctcagatcctgatcaagaacacgcctgtacctgcggatcctccgaccaccttcaaccagtcaaagctgaactctttcatcacgcaatacagcaccggacaggtcagcgtggaaattgaatgggagctgcagaaggaaaacagcaagcgctggaaccccgagatccagtacacctccaactactacaaatctacaagtgtggactttgctgttaatacagaaggcgtgtactctgaaccccaccccattggcacccgttacctcacccgtcccctgtaa

SEQ ID NO: 48 - DNA, 1605 bp, synthetic construct
  misc_feature 1..1605: note = ITB102 45 VP3
  source 1..1605: mol_type = other DNA
atggcttcaggcggtggcgcaccaatggcggacaataacgaaggcgccgacggagtgggtaatgcctcaggaaattggcattgcgattccacatggctgggcgacagagtcatcaccaccagcacccgcacctgggccttgcccacctacaataaccacctctacaagcaaatctccagtgcttcaacgggggccagcaacgacaaccactacttcggctacagcaccccctgggggtattttgacttcaacagattccactgccacttttcaccacgtgactggcaaagactcatcaacaacaactggggattccgacccaagagactcaacttcaagctctttaacattcaagtcaaagaggttacggacaacaatggagtcaagaccatcgccaataaccttaccagcacggtccaggtcttcacggactcagactatcagctcccgtacgtgctcgggtcggctcacgagggctgcctcccgccgttcccagcggacgttttcatgattcctcagtacggctacctaacgctcaacaatggcagccaggcagtgggacggtcatccttttactgcctggaatatttcccatcgcagatgctgagaacgggcaacaactttaccttcagctacacctttgaggacgttcctttccacagcagctacgctcacagccagagtctggaccggctgatgaatcctctgattgaccagtacctgtactacttgtctcggactcaaacaacaggaggcacggcaaatacgcagactctgggcttcagccaaggtgggcctaatacaatggccaatcaggcaaagaactggctgccaggaccctgttaccgccaacaacgcgtctcaacgacaaccgggcaaaacaacaatagcaactttgcctggactgctgggaccaaataccatctgaatggaagaaattcattgatgaatcctggccccgctatggcatcccacaaagagggcgaggaccgtttttttcccctgtccgggtccctgatttttggcaaacaaggcactggcagagacaatgtggatgccgacaaagtcatgatcaccaacgaggaagaaatcaaaaccactaaccctgtggctacagaggaatacggtatcgtggcagataacttgcagcagcaaaacacggctcctcaaattggaactgtcaacagccagggggccttacccggtatggtctggcagaaccgggacgtgtacctgcagggtcccatctgggccaagattcctcacacggacggcaacttccacccgtctccgctgatgggcggctttggcctgaaacatcctccgcctcagatcctgatcaagaacacgcctgtacctgcggatcctccgaccaccttcaaccagtcaaagctgaactctttcatcacgcaatacagcaccggacaggtcagcgtggaaattgaatgggagctgcagaaggaaaacagcaagcgctggaaccccgagatccagtacacctccaactactacaaatctacaagtgtggactttgctgttaatacagaaggcgtgtactctgaaccccaccccattggcacccgttacctcacccgtcccctgtaa

SEQ ID NO: 49 - protein, 736 aa, synthetic construct
  REGION 1..736: note = ITB102 45 VP1
MAADGYLPDWLEDNLSEGIREWWALKPGAPKPKANQQKQDDGRGLVLPGYKYLGPFNGLDKGEPVNAADAAALEHDKAYDQQLKAGDNPYLRYNHADAEFQERLQEDTSFGGNLGRAVFQAKKRVLEPFGLVEEGAKTAPGKKRPVEQSPQEPDSSSGIGKTGQQPAKKRLNFGQTGDSESVPDPQPLGEPPATPAAVGPTTMASGGGAPMADNNEGADGVGNASGNWHCDSTWLGDRVITTSTRTWALPTYNNHLYKQISSASTGASNDNHYFGYSTPWGYFDFNRFHCHFSPRDWQRLINNNWGFRPKRLNFKLFNIQVKEVTDNNGVKTIANNLTSTVQVFTDSDYQLPYVLGSAHEGCLPPFPADVFMIPQYGYLTLNNGSQAVGRSSFYCLEYFPSQMLRTGNNFTFSYTFEDVPFHSSYAHSQSLDRLMNPLIDQYLYYLSRTQTTGGTANTQTLGFSQGGPNTMANQAKNWLPGPCYRQQRVSTTTGQNNNSNFAWTAGTKYHLNGRNSLMNPGPAMASHKEGEDRFFPLSGSLIFGKQGTGRDNVDADKVMITNEEEIKTTNPVATEEYGIVADNLQQQNTAPQIGTVNSQGALPGMVWQNRDVYLQGPIWAKIPHTDGNFHPSPLMGGFGLKHPPPQILIKNTPVPADPPTTFNQSKLNSFITQYSTGQVSVEIEWELQKENSKRWNPEIQYTSNYYKSTSVDFAVNTEGVYSEPHPIGTRYLTRPL

SEQ ID NO: 50 - protein, 599 aa, synthetic construct
  REGION 1..599: note = ITB102 45 VP2
MAPGKKRPVEQSPQEPDSSSGIGKTGQQPAKKRLNFGQTGDSESVPDPQPLGEPPATPAAVGPTTMASGGGAPMADNNEGADGVGNASGNWHCDSTWLGDRVITTSTRTWALPTYNNHLYKQISSASTGASNDNHYFGYSTPWGYFDFNRFHCHFSPRDWQRLINNNWGFRPKRLNFKLFNIQVKEVTDNNGVKTIANNLTSTVQVFTDSDYQLPYVLGSAHEGCLPPFPADVFMIPQYGYLTLNNGSQAVGRSSFYCLEYFPSQMLRTGNNFTFSYTFEDVPFHSSYAHSQSLDRLMNPLIDQYLYYLSRTQTTGGTANTQTLGFSQGGPNTMANQAKNWLPGPCYRQQRVSTTTGQNNNSNFAWTAGTKYHLNGRNSLMNPGPAMASHKEGEDRFFPLSGSLIFGKQGTGRDNVDADKVMITNEEEIKTTNPVATEEYGIVADNLQQQNTAPQIGTVNSQGALPGMVWQNRDVYLQGPIWAKIPHTDGNFHPSPLMGGFGLKHPPPQILIKNTPVPADPPTTFNQSKLNSFITQYSTGQVSVEIEWELQKENSKRWNPEIQYTSNYYKSTSVDFAVNTEGVYSEPHPIGTRYLTRPL

SEQ ID NO: 51 - protein, 534 aa, synthetic construct
  REGION 1..534: note = ITB102 45 VP3
MASGGGAPMADNNEGADGVGNASGNWHCDSTWLGDRVITTSTRTWALPTYNNHLYKQISSASTGASNDNHYFGYSTPWGYFDFNRFHCHFSPRDWQRLINNNWGFRPKRLNFKLFNIQVKEVTDNNGVKTIANNLTSTVQVFTDSDYQLPYVLGSAHEGCLPPFPADVFMIPQYGYLTLNNGSQAVGRSSFYCLEYFPSQMLRTGNNFTFSYTFEDVPFHSSYAHSQSLDRLMNPLIDQYLYYLSRTQTTGGTANTQTLGFSQGGPNTMANQAKNWLPGPCYRQQRVSTTTGQNNNSNFAWTAGTKYHLNGRNSLMNPGPAMASHKEGEDRFFPLSGSLIFGKQGTGRDNVDADKVMITNEEEIKTTNPVATEEYGIVADNLQQQNTAPQIGTVNSQGALPGMVWQNRDVYLQGPIWAKIPHTDGNFHPSPLMGGFGLKHPPPQILIKNTPVPADPPTTFNQSKLNSFITQYSTGQVSVEIEWELQKENSKRWNPEIQYTSNYYKSTSVDFAVNTEGVYSEPHPIGTRYLTRPL

SEQ ID NO: 52 - protein, 7 aa, synthetic construct
  REGION 1..7: note = VR-I
SASTGAS

SEQ ID NO: 53 - protein, 8 aa, synthetic construct
  REGION 1..8: note = VR-I
NSTSGGSS

SEQ ID NO: 54 - protein, 6 aa, synthetic construct
  REGION 1..6: note = VR-II
DNNGVK

SEQ ID NO: 55 - protein, 4 aa, synthetic construct
  REGION 1..4: note = VR-III
NDGS

SEQ ID NO: 56 - protein, 10 aa, synthetic construct
  REGION 1..10: note = VR-IV
INGSGQNQQT

SEQ ID NO: 57 - protein, 18 aa, synthetic construct
  REGION 1..18: note = VR-V
RVSTTTGQNNNSNFAWTA

SEQ ID NO: 58 - protein, 13 aa, synthetic construct
  REGION 1..13: note = VR-VI
HKEGEDRFFPLSG

SEQ ID NO: 59 - protein, 14 aa, synthetic construct
  REGION 1..14: note = VR-VII
KQNAARDNADYSDV

SEQ ID NO: 60 - protein, 13 aa, synthetic construct
  REGION 1..13: note = VR-VIII
ADNLQQQNTAPQI

SEQ ID NO: 61 - protein, 10 aa, synthetic construct
  REGION 1..10: note = VR-IX
NYYKSTSVDF

SEQ ID NO: 62 - DNA, 2211 bp, synthetic construct
  misc_feature 1..2211: note = AAV6 VP1
  source 1..2211: mol_type = other DNA
atggctgccgatggttatcttccagattggctcgaggacaacctctctgagggcattcgcgagtggtgggacttgaaacctggagccccgaaacccaaagccaaccagcaaaagcaggacgacggccggggtctggtgcttcctggctacaagtacctcggacccttcaacggactcgacaagggggagcccgtcaacgcggcggatgcagcggccctcgagcacgacaaggcctacgaccagcagctcaaagcgggtgacaatccgtacctgcggtataaccacgccgacgccgagtttcaggagcgtctgcaagaagatacgtcttttgggggcaacctcgggcgagcagtcttccaggccaagaagagggttctcgaaccttttggtctggttgaggaaggtgctaagacggctcctggaaagaaacgtccggtagagcagtcgccacaagagccagactcctcctcgggcattggcaagacaggccagcagcccgctaaaaagagactcaattttggtcagactggcgactcagagtcagtccccgacccacaacctctcggagaacctccagcaacccccgctgctgtgggacctactacaatggcttcaggcggtggcgcaccaatggcagacaataacgaaggcgccgacggagtgggtaatgcctcaggaaattggcattgcgattccacatggctgggcgacagagtcatcaccaccagcacccgaacatgggccttgcccacctataacaaccacctctacaagcaaatctccagtgcttcaacgggggccagcaacgacaaccactacttcggctacagcaccccctgggggtattttgatttcaacagattccactgccatttctcaccacgtgactggcagcgactcatcaacaacaattggggattccggcccaagagactcaacttcaagctcttcaacatccaagtcaaggaggtcacgacgaatgatggcgtcacgaccatcgctaataaccttaccagcacggttcaagtcttctcggactcggagtaccagttgccgtacgtcctcggctctgcgcaccagggctgcctccctccgttcccggcggacgtgttcatgattccgcagtacggctacctaacgctcaacaatggcagccaggcagtgggacggtcatccttttactgcctggaatatttcccatcgcagatgctgagaacgggcaataactttaccttcagctacaccttcgaggacgtgcctttccacagcagctacgcgcacagccagagcctggaccggctgatgaatcctctcatcgaccagtacctgtattacctgaacagaactcagaatcagtccggaagtgcccaaaacaaggacttgctgtttagccgggggtctccagctggcatgtctgttcagcccaaaaactggctacctggaccctgttaccggcagcagcgcgtttctaaaacaaaaacagacaacaacaacagcaactttacctggactggtgcttcaaaatataaccttaatgggcgtgaatctataatcaaccctggcactgctatggcctcacacaaagacgacaaagacaagttctttcccatgagcggtgtcatgatttttggaaaggagagcgccggagcttcaaacactgcattggacaatgtcatgatcacagacgaagaggaaatcaaagccactaaccccgtggccaccgaaagatttgggactgtggcagtcaatctccagagcagcagcacagaccctgcgaccggagatgtgcatgttatgggagccttacctggaatggtgtggcaagacagagacgtatacctgcagggtcctatttgggccaaaattcctcacacggatggacactttcacccgtctcctctcatgggcggctttggacttaagcacccgcctcctcagatcctcatcaaaaacacgcctgttcctgcgaatcctccggcagagttttcggctacaaagtttgcttcattcatcacccagtattccacaggacaagtgagcgtggagattgaatgggagctgcagaaagaaaacagcaaacgctggaatcccgaagtgcagtatacatctaactatgcaaaatctgccaacgttgatttcactgtggacaacaatggactttatactgagcctcgccccattggcacccgttacctcacccgtcccctgtaa

SEQ ID NO: 63 - protein, 736 aa, synthetic construct
  REGION 1..736: note = AAV6 VP1
MAADGYLPDWLEDNLSEGIREWWDLKPGAPKPKANQQKQDDGRGLVLPGYKYLGPFNGLDKGEPVNAADAAALEHDKAYDQQLKAGDNPYLRYNHADAEFQERLQEDTSFGGNLGRAVFQAKKRVLEPFGLVEEGAKTAPGKKRPVEQSPQEPDSSSGIGKTGQQPAKKRLNFGQTGDSESVPDPQPLGEPPATPAAVGPTTMASGGGAPMADNNEGADGVGNASGNWHCDSTWLGDRVITTSTRTWALPTYNNHLYKQISSASTGASNDNHYFGYSTPWGYFDFNRFHCHFSPRDWQRLINNNWGFRPKRLNFKLFNIQVKEVTTNDGVTTIANNLTSTVQVFSDSEYQLPYVLGSAHQGCLPPFPADVFMIPQYGYLTLNNGSQAVGRSSFYCLEYFPSQMLRTGNNFTFSYTFEDVPFHSSYAHSQSLDRLMNPLIDQYLYYLNRTQNQSGSAQNKDLLFSRGSPAGMSVQPKNWLPGPCYRQQRVSKTKTDNNNSNFTWTGASKYNLNGRESIINPGTAMASHKDDKDKFFPMSGVMIFGKESAGASNTALDNVMITDEEEIKATNPVATERFGTVAVNLQSSSTDPATGDVHVMGALPGMVWQDRDVYLQGPIWAKIPHTDGHFHPSPLMGGFGLKHPPPQILIKNTPVPANPPAEFSATKFASFITQYSTGQVSVEIEWELQKENSKRWNPEVQYTSNYAKSANVDFTVDNNGLYTEPRPIGTRYLTRPL

SEQ ID NO: 64 - protein, 599 aa, synthetic construct
  REGION 1..599: note = AAV6 VP2
TAPGKKRPVEQSPQEPDSSSGIGKTGQQPAKKRLNFGQTGDSESVPDPQPLGEPPATPAAVGPTTMASGGGAPMADNNEGADGVGNASGNWHCDSTWLGDRVITTSTRTWALPTYNNHLYKQISSASTGASNDNHYFGYSTPWGYFDFNRFHCHFSPRDWQRLINNNWGFRPKRLNFKLFNIQVKEVTTNDGVTTIANNLTSTVQVFSDSEYQLPYVLGSAHQGCLPPFPADVFMIPQYGYLTLNNGSQAVGRSSFYCLEYFPSQMLRTGNNFTFSYTFEDVPFHSSYAHSQSLDRLMNPLIDQYLYYLNRTQNQSGSAQNKDLLFSRGSPAGMSVQPKNWLPGPCYRQQRVSKTKTDNNNSNFTWTGASKYNLNGRESIINPGTAMASHKDDKDKFFPMSGVMIFGKESAGASNTALDNVMITDEEEIKATNPVATERFGTVAVNLQSSSTDPATGDVHVMGALPGMVWQDRDVYLQGPIWAKIPHTDGHFHPSPLMGGFGLKHPPPQILIKNTPVPANPPAEFSATKFASFITQYSTGQVSVEIEWELQKENSKRWNPEVQYTSNYAKSANVDFTVDNNGLYTEPRPIGTRYLTRPL

SEQ ID NO: 65 - protein, 534 aa, synthetic construct
  REGION 1..534: note = AAV6 VP3
MASGGGAPMADNNEGADGVGNASGNWHCDSTWLGDRVITTSTRTWALPTYNNHLYKQISSASTGASNDNHYFGYSTPWGYFDFNRFHCHFSPRDWQRLINNNWGFRPKRLNFKLFNIQVKEVTTNDGVTTIANNLTSTVQVFSDSEYQLPYVLGSAHQGCLPPFPADVFMIPQYGYLTLNNGSQAVGRSSFYCLEYFPSQMLRTGNNFTFSYTFEDVPFHSSYAHSQSLDRLMNPLIDQYLYYLNRTQNQSGSAQNKDLLFSRGSPAGMSVQPKNWLPGPCYRQQRVSKTKTDNNNSNFTWTGASKYNLNGRESIINPGTAMASHKDDKDKFFPMSGVMIFGKESAGASNTALDNVMITDEEEIKATNPVATERFGTVAVNLQSSSTDPATGDVHVMGALPGMVWQDRDVYLQGPIWAKIPHTDGHFHPSPLMGGFGLKHPPPQILIKNTPVPANPPAEFSATKFASFITQYSTGQVSVEIEWELQKENSKRWNPEVQYTSNYAKSANVDFTVDNNGLYTEPRPIGTRYLTRPL

SEQ ID NO: 66 - DNA, 2217 bp, synthetic construct
  misc_feature 1..2217: note = AAV8 VP1
  source 1..2217: mol_type = other DNA
atggctgccgatggttatcttccagattggctcgaggacaacctctctgagggcattcgcgagtggtgggcgctgaaacctggagccccgaagcccaaagccaaccagcaaaagcaggacgacggccggggtctggtgcttcctggctacaagtacctcggacccttcaacggactcgacaagggggagcccgtcaacgcggcggacgcagcggccctcgagcacgacaaggcctacgaccagcagctgcaggcgggtgacaatccgtacctgcggtataaccacgccgacgccgagtttcaggagcgtctgcaagaagatacgtcttttgggggcaacctcgggcgagcagtcttccaggccaagaagcgggttctcgaacctctcggtctggttgaggaaggcgctaagacggctcctggaaagaagagaccggtagagccatcaccccagcgttctccagactcctctacgggcatcggcaagaaaggccaacagcccgccagaaaaagactcaattttggtcagactggcgactcagagtcagttccagaccctcaacctctcggagaacctccagcagcgccctctggtgtgggacctaatacaatggctgcaggcggtggcgcaccaatggcagacaataacgaaggcgccgacggagtgggtagttcctcgggaaattggcattgcgattccacatggctgggcgacagagtcatcaccaccagcacccgaacctgggccctgcccacctacaacaaccacctctacaagcaaatctccaacgggacatcgggaggagccaccaacgacaacacctacttcggctacagcaccccctgggggtattttgactttaacagattccactgccacttttcaccacgtgactggcagcgactcatcaacaacaactggggattccggcccaagagactcagcttcaagctcttcaacatccaggtcaaggaggtcacgcagaatgaaggcaccaagaccatcgccaataacctcaccagcaccatccaggtgtttacggactcggagtaccagctgccgtacgttctcggctctgcccaccagggctgcctgcctccgttcccggcggacgtgttcatgattccccagtacggctacctaacactcaacaacggtagtcaggccgtgggacgctcctccttctactgcctggaatactttccttcgcagatgctgagaaccggcaacaacttccagtttacttacaccttcgaggacgtgcctttccacagcagctacgcccacagccagagcttggaccggctgatgaatcctctgattgaccagtacctgtactacttgtctcggactcaaacaacaggaggcacggcaaatacgcagactctgggcttcagccaaggtgggcctaatacaatggccaatcaggcaaagaactggctgccaggaccctgttaccgccaacaacgcgtctcaacgacaaccgggcaaaacaacaatagcaactttgcctggactgctgggaccaaataccatctgaatggaagaaattcattggctaatcctggcatcgctatggcaacacacaaagacgacgaggagcgtttttttcccagtaacgggatcctgatttttggcaaacaaaatgctgccagagacaatgcggattacagcgatgtcatgctcaccagcgaggaagaaatcaaaaccactaaccctgtggctacagaggaatacggtatcgtggcagataacttgcagcagcaaaacacggctcctcaaattggaactgtcaacagccagggggccttacccggtatggtctggcagaaccgggacgtgtacctgcagggtcccatctgggccaagattcctcacacggacggcaacttccacccgtctccgctgatgggcggctttggcctgaaacatcctccgcctcagatcctgatcaagaacacgcctgtacctgcggatcctccgaccaccttcaaccagtcaaagctgaactctttcatcacgcaatacagcaccggacaggtcagcgtggaaattgaatgggagctgcagaaggaaaacagcaagcgctggaaccccgagatccagtacacctccaactactacaaatctacaagtgtggactttgctgttaatacagaaggcgtgtactctgaaccccgccccattggcacccgttacctcacccgtaatctgtaa

SEQ ID NO: 67 - protein, 738 aa, synthetic construct
  REGION 1..738: note = AAV8 VP1
MAADGYLPDWLEDNLSEGIREWWALKPGAPKPKANQQKQDDGRGLVLPGYKYLGPFNGLDKGEPVNAADAAALEHDKAYDQQLQAGDNPYLRYNHADAEFQERLQEDTSFGGNLGRAVFQAKKRVLEPLGLVEEGAKTAPGKKRPVEPSPQRSPDSSTGIGKKGQQPARKRLNFGQTGDSESVPDPQPLGEPPAAPSGVGPNTMAAGGGAPMADNNEGADGVGSSSGNWHCDSTWLGDRVITTSTRTWALPTYNNHLYKQISNGTSGGATNDNTYFGYSTPWGYFDFNRFHCHFSPRDWQRLINNNWGFRPKRLSFKLFNIQVKEVTQNEGTKTIANNLTSTIQVFTDSEYQLPYVLGSAHQGCLPPFPADVFMIPQYGYLTLNNGSQAVGRSSFYCLEYFPSQMLRTGNNFQFTYTFEDVPFHSSYAHSQSLDRLMNPLIDQYLYYLSRTQTTGGTANTQTLGFSQGGPNTMANQAKNWLPGPCYRQQRVSTTTGQNNNSNFAWTAGTKYHLNGRNSLANPGIAMATHKDDEERFFPSNGILIFGKQNAARDNADYSDVMLTSEEEIKTTNPVATEEYGIVADNLQQQNTAPQIGTVNSQGALPGMVWQNRDVYLQGPIWAKIPHTDGNFHPSPLMGGFGLKHPPPQILIKNTPVPADPPTTFNQSKLNSFITQYSTGQVSVEIEWELQKENSKRWNPEIQYTSNYYKSTSVDFAVNTEGVYSEPRPIGTRYLTRNL

SEQ ID NO: 68 - protein, 601 aa, synthetic construct
  REGION 1..601: note = AAV8 VP2
MAPGKKRPVEPSPQRSPDSSTGIGKKGQQPARKRLNFGQTGDSESVPDPQPLGEPPAAPSGVGPNTMAAGGGAPMADNNEGADGVGSSSGNWHCDSTWLGDRVITTSTRTWALPTYNNHLYKQISNGTSGGATNDNTYFGYSTPWGYFDFNRFHCHFSPRDWQRLINNNWGFRPKRLSFKLFNIQVKEVTQNEGTKTIANNLTSTIQVFTDSEYQLPYVLGSAHQGCLPPFPADVFMIPQYGYLTLNNGSQAVGRSSFYCLEYFPSQMLRTGNNFQFTYTFEDVPFHSSYAHSQSLDRLMNPLIDQYLYYLSRTQTTGGTANTQTLGFSQGGPNTMANQAKNWLPGPCYRQQRVSTTTGQNNNSNFAWTAGTKYHLNGRNSLANPGIAMATHKDDEERFFPSNGILIFGKQNAARDNADYSDVMLTSEEEIKTTNPVATEEYGIVADNLQQQNTAPQIGTVNSQGALPGMVWQNRDVYLQGPIWAKIPHTDGNFHPSPLMGGFGLKHPPPQILIKNTPVPADPPTTFNQSKLNSFITQYSTGQVSVEIEWELQKENSKRWNPEIQYTSNYYKSTSVDFAVNTEGVYSEPRPIGTRYLTRNL

SEQ ID NO: 69 - protein, 535 aa, synthetic construct
  REGION 1..535: note = AAV8 VP3
MAAGGGAPMADNNEGADGVGSSSGNWHCDSTWLGDRVITTSTRTWALPTYNNHLYKQISNGTSGGATNDNTYFGYSTPWGYFDFNRFHCHFSPRDWQRLINNNWGFRPKRLSFKLFNIQVKEVTQNEGTKTIANNLTSTIQVFTDSEYQLPYVLGSAHQGCLPPFPADVFMIPQYGYLTLNNGSQAVGRSSFYCLEYFPSQMLRTGNNFQFTYTFEDVPFHSSYAHSQSLDRLMNPLIDQYLYYLSRTQTTGGTANTQTLGFSQGGPNTMANQAKNWLPGPCYRQQRVSTTTGQNNNSNFAWTAGTKYHLNGRNSLANPGIAMATHKDDEERFFPSNGILIFGKQNAARDNADYSDVMLTSEEEIKTTNPVATEEYGIVADNLQQQNTAPQIGTVNSQGALPGMVWQNRDVYLQGPIWAKIPHTDGNFHPSPLMGGFGLKHPPPQILIKNTPVPADPPTTFNQSKLNSFITQYSTGQVSVEIEWELQKENSKRWNPEIQYTSNYYKSTSVDFAVNTEGVYSEPRPIGTRYLTRNL

SEQ ID NO: 70 - DNA, 2214 bp, synthetic construct
  misc_feature 1..2214: note = AAV9 VP1
  source 1..2214: mol_type = other DNA
atggctgccgatggttatcttccagattggctcgaggacaacctctctgagggcattcgcgagtggtgggcgctgaaacctggagccccgaagcccaaagccaaccagcaaaagcaggacgacggccggggtctggtgcttcctggctacaagtacctcggacccttcaacggactcgacaagggggagcccgtcaacgcggcggacgcagcggccctcgagcacggcaaggcctacgaccagcagctgcaggcgggtgacaatccgtacctgcggtataaccacgccgacgccgagtttcaggagcgtctgcaagaagatacgtcttttgggggcaacctcgggcgagcagtcttccaggccaagaagcgggttctcgaacctctcggtctggttgaggaaggcgctaagacggctcctggaaagaagagaccggtagagccatcaccccagcgttctccagactcctctacgggcatcggcaagaaaggccaacagcccgccagaaaaagactcaattttggtcagactggcgactcagagtcagttccagaccctcaacctctcggagaacctccagcagcgccctctggtgtgggacctaatacaatggctgcaggcggtggcgcaccaatggcagacaataacgaaggcgccgacggagtgggtaattcctcgggaaattggcattgcgattccacatggctgggggacagagtcatcaccaccagcacccgaacctgggcattgcccacctacaacaaccacctctacaagcaaatctccaatggaacatcgggaggaagcaccaacgacaacacctactttggctacagcaccccctgggggtattttgacttcaacagattccactgccacttctcaccacgtgactggcagcgactcatcaacaacaactggggattccggccaaagagactcaacttcaagctgttcaacatccaggtcaaggaggttacgacgaacgaaggcaccaagaccatcgccaataaccttaccagcaccgtccaggtctttacggactcggagtaccagctaccgtacgtcctaggctctgcccaccaaggatgcctgccaccgtttcctgcagacgtcttcatggttcctcagtacggctacctgacgctcaacaatggaagtcaagcgttaggacgttcttctttctactgtctggaatacttcccttctcagatgctgagaaccggcaacaactttcagttcagctacactttcgaggacgtgcctttccacagcagctacgcacacagccagagtctagatcgactgatgaaccccctcatcgaccagtacctatactacctggtcagaacacagacaactggaactgggggaactcaaactttggcattcagccaagcaggccctagctcaatggccaatcaggctagaaactgggtacccgggccttgctaccgtcagcagcgcgtctccacaaccaccaaccaaaataacaacagcaactttgcgtggacgggagctgctaaattcaagctgaacgggagagactcgctaatgaatcctggcgtggctatggcatcgcacaaagacgacgaggaccgcttctttccatcaagtggcgttctcatatttggcaagcaaggagccgggaacgatggagtcgactacagccaggtgctgattacagatgaggaagaaattaaagccaccaaccctgtagccacagaggaatacggagcagtggccatcaacaaccaggccgctaacacgcaggcgcaaactggacttgtgcataaccagggagttattcctggtatggtctggcagaaccgggacgtgtacctgcagggccctatttgggctaaaatacctcacacagatggcaactttcacccgtctcctctgatgggtggatttggactgaaacacccacctccacagattctaattaaaaatacaccagtgccggcagatcctcctcttaccttcaatcaagccaagctgaactctttcatcacgcagtacagcacgggacaagtcagcgtggaaatcgagtgggagctgcagaaagaaaacagcaagcgctggaatccagagatccagtatacttcaaactactacaaatctacaaatgtggactttgctgtcaataccaaaggtgtttactctgagcctcgccccattggtactcgttacctcacccgtaatttgtaa

SEQ ID NO: 71 - protein, 736 aa, synthetic construct
  REGION 1..736: note = AAV9 VP1
MAADGYLPDWLEDNLSEGIREWWALKPGAPQPKANQQHQDNARGLVLPGYKYLGPGNGLDKGEPVNAADAAALEHDKAYDQQLKAGDNPYLKYNHADAEFQERLKEDTSFGGNLGRAVFQAKKRLLEPLGLVEEAAKTAPGKKRPVEQSPQEPDSSAGIGKSGAQPAKKRLNFGQTGDTESVPDPQPIGEPPAAPSGVGSLTMASGGGAPVADNNEGADGVGSSSGNWHCDSQWLGDRVITTSTRTWALPTYNNHLYKQISNSTSGGSSNDNAYFGYSTPWGYFDFNRFHCHFSPRDWQRLINNNWGFRPKRLNFKLFNIQVKEVTDNNGVKTIANNLTSTVQVFTDSDYQLPYVLGSAHEGCLPPFPADVFMIPQYGYLTLNDGSQAVGRSSFYCLEYFPSQMLRTGNNFQFSYEFENVPFHSSYAHSQSLDRLMNPLIDQYLYYLSKTINGSGQNQQTLKFSVAGPSNMAVQGRNYIPGPSYRQQRVSTTVTQNNNSEFAWPGASSWALNGRNSLMNPGPAMASHKEGEDRFFPLSGSLIFGKQGTGRDNVDADKVMITNEEEIKTTNPVATESYGQVATNHQSAQAQAQTGWVQNQGILPGMVWQDRDVYLQGPIWAKIPHTDGNFHPSPLMGGFGMKHPPPQILIKNTPVPADPPTAFNKDKLNSFITQYSTGQVSVEIEWELQKENSKRWNPEIQYTSNYYKSNNVEFAVNTEGVYSEPRPIGTRYLTRNL

SEQ ID NO: 72 - protein, 599 aa, synthetic construct
  REGION 1..599: note = AAV9 VP2
MAPGKKRPVEQSPQEPDSSAGIGKSGAQPAKKRLNFGQTGDTESVPDPQPIGEPPAAPSGVGSLTMASGGGAPVADNNEGADGVGSSSGNWHCDSQWLGDRVITTSTRTWALPTYNNHLYKQISNSTSGGSSNDNAYFGYSTPWGYFDFNRFHCHFSPRDWQRLINNNWGFRPKRLNFKLFNIQVKEVTDNNGVKTIANNLTSTVQVFTDSDYQLPYVLGSAHEGCLPPFPADVFMIPQYGYLTLNDGSQAVGRSSFYCLEYFPSQMLRTGNNFQFSYEFENVPFHSSYAHSQSLDRLMNPLIDQYLYYLSKTINGSGQNQQTLKFSVAGPSNMAVQGRNYIPGPSYRQQRVSTTVTQNNNSEFAWPGASSWALNGRNSLMNPGPAMASHKEGEDRFFPLSGSLIFGKQGTGRDNVDADKVMITNEEEIKTTNPVATESYGQVATNHQSAQAQAQTGWVQNQGILPGMVWQDRDVYLQGPIWAKIPHTDGNFHPSPLMGGFGMKHPPPQILIKNTPVPADPPTAFNKDKLNSFITQYSTGQVSVEIEWELQKENSKRWNPEIQYTSNYYKSNNVEFAVNTEGVYSEPRPIGTRYLTRNL

SEQ ID NO: 73 - protein, 534 aa, synthetic construct
  REGION 1..534: note = AAV9 VP3
MASGGGAPVADNNEGADGVGSSSGNWHCDSQWLGDRVITTSTRTWALPTYNNHLYKQISNSTSGGSSNDNAYFGYSTPWGYFDFNRFHCHFSPRDWQRLINNNWGFRPKRLNFKLFNIQVKEVTDNNGVKTIANNLTSTVQVFTDSDYQLPYVLGSAHEGCLPPFPADVFMIPQYGYLTLNDGSQAVGRSSFYCLEYFPSQMLRTGNNFQFSYEFENVPFHSSYAHSQSLDRLMNPLIDQYLYYLSKTINGSGQNQQTLKFSVAGPSNMAVQGRNYIPGPSYRQQRVSTTVTQNNNSEFAWPGASSWALNGRNSLMNPGPAMASHKEGEDRFFPLSGSLIFGKQGTGRDNVDADKVMITNEEEIKTTNPVATESYGQVATNHQSAQAQAQTGWVQNQGILPGMVWQDRDVYLQGPIWAKIPHTDGNFHPSPLMGGFGMKHPPPQILIKNTPVPADPPTAFNKDKLNSFITQYSTGQVSVEIEWELQKENSKRWNPEIQYTSNYYKSNNVEFAVNTEGVYSEPRPIGTRYLTRNL

SEQ ID NO: 74 - protein, 6 aa, synthetic construct
  REGION 1..6: note = VRII-204/AAV6
TNDGVK

SEQ ID NO: 75 - protein, 4 aa, synthetic construct
  REGION 1..4: note = VRIII-204/AAV6
NNGS

SEQ ID NO: 76 - protein, 11 aa, synthetic construct
  REGION 1..11: note = VRIV-204/AAV6
QNQSGSAQNKD

SEQ ID NO: 77 - protein, 18 aa, synthetic construct
  REGION 1..18: note = VRV-204/AAV6
RVSKTKTDNNNSNFTWTG

SEQ ID NO: 78 - protein, 13 aa, synthetic construct
  REGION 1..13: note = VRVI-204/AAV6
HKDDKDKFFPMSG

SEQ ID NO: 79 - protein, 14 aa, synthetic construct
  REGION 1..14: note = VRVII-204/AAV6
KESAGASNTALDNV

SEQ ID NO: 80 - protein, 13 aa, synthetic construct
  REGION 1..13: note = VRVIII-204/AAV6
AVNLQNSSTDPAT

SEQ ID NO: 81 - protein, 10 aa, synthetic construct
  REGION 1..10: note = VRIX-204/AAV6
NYAKSANVDF

SEQ ID NO: 82 - DNA, 2211 bp, synthetic construct
  misc_feature 1..2211: note = AAV214-AB VP1
  source 1..2211: mol_type = other DNA
atggctgccgatggttatcttccagattggctcgaggacaacctctctgagggcattcgcgagtggtgggcgctgaaacctggagccccgaagcccaaagccaaccagcaaaagcaggacgacggccggggtctggtgcttcctggctacaagtacctcggacccttcaacggactcgacaagggggagcccgtcaacgcggcggacgcagcggccctcgagcacgacaaggcctacgaccagcagctcaaagcgggtgacaatccgtacctgcggtataaccacgccgacgccgagtttcaggagcgtctgcaagaagatacgtcttttgggggcaacctcgggcgagcagtcttccaggccaagaagcgggttctcgaaccttttggtctggttgaggaaggtgctaagacggctcctggaaagaaacgtccggtagagcagtcgccacaagagccagactcctcctcgggcatcggcaagacaggccagcagcccgctaaaaagagactcaattttggtcagactggcgactcagagtcagtccccgacccacaacctctcggagaacctccagcaacccccgctgctgtgggacctactacaatggcttcaggcggtggcgcaccaatggcggacaataacgaaggcgccgacggagtgggtaatgcctcaggaaattggcattgcgattccacatggctgggcgacagagtcatcaccaccagcacccgcacctgggccttgcccacctacaataaccacctctacaagcaaatctccagcagcacatctggaggatcttcaaatgacaacgcctacttcggctacagcaccccctgggggtattttgacttcaacagattccactgccacttttcaccacgtgactggcaaagactcatcaacaacaactggggattccgacccaagagactcaacttcaagctctttaacattcaagtcaaagaggttacggacaacaatggagtcaagaccatcgccaataaccttaccagcacggtccaggtcttcacggactcagactatcagctcccgtacgtcctcggctctgcgcaccagggctgcctccctccgttcccggcggacgtgttcatgattccgcagtacggctacctaacgctcaacgacggcagccaggcagtgggacggtcatccttttactgcctggaatatttcccatcgcagatgctgagaacgggcaacaactttaccttcagctacacctttgaggacgttcctttccacagcagctacgctcacagccagagtctggaccgtctcatgaatcctctgattgaccagtacctgtactacttgtctaagactatcaacggatccggccagaatcagcagactctgaagttcagccaaggtgggcctaatacaatggccaatcaggcaaagaactggctgccaggaccctgttaccgccaacaacgcgtctcaacgacaaccgggcaaaacaacaatagcaactttgcctggactgctgggaccaaataccatctgaatggaagaaattcattgatgaatcctggccccgctatggcatcccacaaagagggcgaggaccgtttttttcccctgtccgggtccctgatttttggcaaacaaaatgctgccagagacaatgcggattacagcgatgtcatgctcaccagcgaggaagaaatcaaaaccactaaccctgtggctacagaggaatacggtatcgtggcagataacttgcagcagcaaaacacggctcctcaaattggaactgtcaacagccagggggccttacccggtatggtctggcagaaccgggacgtgtacctgcagggtcccatctgggccaagattcctcacacggacggcaacttccacccgtctccgctgatgggcggctttggcctgaaacatcctccgcctcagatcctgatcaagaacacgcctgtacctgcggatcctccgaccaccttcaaccagtcaaagctgaactctttcatcacgcaatacagcaccggacaggtcagcgtggaaattgaatgggagctgcagaaggaaaacagcaagcgctggaaccccgagatccagtacacctccaactactacaaatctacaagtgtggactttgctgttaatacagaaggcgtgtactctgaaccccaccccattggcacccgttacctcacccgtcccctgtaa

SEQ ID NO: 83 - DNA, 1605 bp, synthetic construct
  misc_feature 1..1605: note = AAV214-AB VP3
  source 1..1605: mol_type = other DNA
atggcttcaggcggtggcgcaccaatggcggacaataacgaaggcgccgacggagtgggtaatgcctcaggaaattggcattgcgattccacatggctgggcgacagagtcatcaccaccagcacccgcacctgggccttgcccacctacaataaccacctctacaagcaaatctccagcagcacatctggaggatcttcaaatgacaacgcctacttcggctacagcaccccctgggggtattttgacttcaacagattccactgccacttttcaccacgtgactggcaaagactcatcaacaacaactggggattccgacccaagagactcaacttcaagctctttaacattcaagtcaaagaggttacggacaacaatggagtcaagaccatcgccaataaccttaccagcacggtccaggtcttcacggactcagactatcagctcccgtacgtcctcggctctgcgcaccagggctgcctccctccgttcccggcggacgtgttcatgattccgcagtacggctacctaacgctcaacgacggcagccaggcagtgggacggtcatccttttactgcctggaatatttcccatcgcagatgctgagaacgggcaacaactttaccttcagctacacctttgaggacgttcctttccacagcagctacgctcacagccagagtctggaccgtctcatgaatcctctgattgaccagtacctgtactacttgtctaagactatcaacggatccggccagaatcagcagactctgaagttcagccaaggtgggcctaatacaatggccaatcaggcaaagaactggctgccaggaccctgttaccgccaacaacgcgtctcaacgacaaccgggcaaaacaacaatagcaactttgcctggactgctgggaccaaataccatctgaatggaagaaattcattgatgaatcctggccccgctatggcatcccacaaagagggcgaggaccgtttttttcccctgtccgggtccctgatttttggcaaacaaaatgctgccagagacaatgcggattacagcgatgtcatgctcaccagcgaggaagaaatcaaaaccactaaccctgtggctacagaggaatacggtatcgtggcagataacttgcagcagcaaaacacggctcctcaaattggaactgtcaacagccagggggccttacccggtatggtctggcagaaccgggacgtgtacctgcagggtcccatctgggccaagattcctcacacggacggcaacttccacccgtctccgctgatgggcggctttggcctgaaacatcctccgcctcagatcctgatcaagaacacgcctgtacctgcggatcctccgaccaccttcaaccagtcaaagctgaactctttcatcacgcaatacagcaccggacaggtcagcgtggaaattgaatgggagctgcagaaggaaaacagcaagcgctggaaccccgagatccagtacacctccaactactacaaatctacaagtgtggactttgctgttaatacagaaggcgtgtactctgaaccccaccccattggcacccgttacctcacccgtcccctgtaa

SEQ ID NO: 84 - protein, 736 aa, synthetic construct
  REGION 1..736: note = AAV214AB VP1
MAADGYLPDWLEDNLSEGIREWWALKPGAPKPKANQQKQDDGRGLVLPGYKYLGPFNGLDKGEPVNAADAAALEHDKAYDQQLKAGDNPYLRYNHADAEFQERLQEDTSFGGNLGRAVFQAKKRVLEPFGLVEEGAKTAPGKKRPVEQSPQEPDSSSGIGKTGQQPAKKRLNFGQTGDSESVPDPQPLGEPPATPAAVGPTTMASGGGAPMADNNEGADGVGNASGNWHCDSTWLGDRVITTSTRTWALPTYNNHLYKQISSSTSGGSSNDNAYFGYSTPWGYFDFNRFHCHFSPRDWQRLINNNWGFRPKRLNFKLFNIQVKEVTDNNGVKTIANNLTSTVQVFTDSDYQLPYVLGSAHQGCLPPFPADVFMIPQYGYLTLNDGSQAVGRSSFYCLEYFPSQMLRTGNNFTFSYTFEDVPFHSSYAHSQSLDRLMNPLIDQYLYYLSKTINGSGQNQQTLKFSQGGPNTMANQAKNWLPGPCYRQQRVSTTTGQNNNSNFAWTAGTKYHLNGRNSLMNPGPAMASHKEGEDRFFPLSGSLIFGKQNAARDNADYSDVMLTSEEEIKTTNPVATEEYGIVADNLQQQNTAPQIGTVNSQGALPGMVWQNRDVYLQGPIWAKIPHTDGNFHPSPLMGGFGLKHPPPQILIKNTPVPADPPTTFNQSKLNSFITQYSTGQVSVEIEWELQKENSKRWNPEIQYTSNYYKSTSVDFAVNTEGVYSEPHPIGTRYLTRPL

SEQ ID NO: 85 - protein, 599 aa, synthetic construct
  REGION 1..599: note = AAV214AB VP2
MAPGKKRPVEQSPQEPDSSSGIGKTGQQPAKKRLNFGQTGDSESVPDPQPLGEPPATPAAVGPTTMASGGGAPMADNNEGADGVGNASGNWHCDSTWLGDRVITTSTRTWALPTYNNHLYKQISSSTSGGSSNDNAYFGYSTPWGYFDFNRFHCHFSPRDWQRLINNNWGFRPKRLNFKLFNIQVKEVTDNNGVKTIANNLTSTVQVFTDSDYQLPYVLGSAHQGCLPPFPADVFMIPQYGYLTLNDGSQAVGRSSFYCLEYFPSQMLRTGNNFTFSYTFEDVPFHSSYAHSQSLDRLMNPLIDQYLYYLSKTINGSGQNQQTLKFSQGGPNTMANQAKNWLPGPCYRQQRVSTTTGQNNNSNFAWTAGTKYHLNGRNSLMNPGPAMASHKEGEDRFFPLSGSLIFGKQNAARDNADYSDVMLTSEEEIKTTNPVATEEYGIVADNLQQQNTAPQIGTVNSQGALPGMVWQNRDVYLQGPIWAKIPHTDGNFHPSPLMGGFGLKHPPPQILIKNTPVPADPPTTFNQSKLNSFITQYSTGQVSVEIEWELQKENSKRWNPEIQYTSNYYKSTSVDFAVNTEGVYSEPHPIGTRYLTRPL

SEQ ID NO: 86 - protein, 534 aa, synthetic construct
  REGION 1..534: note = AAV214AB VP3
MASGGGAPMADNNEGADGVGNASGNWHCDSTWLGDRVITTSTRTWALPTYNNHLYKQISSSTSGGSSNDNAYFGYSTPWGYFDFNRFHCHFSPRDWQRLINNNWGFRPKRLNFKLFNIQVKEVTDNNGVKTIANNLTSTVQVFTDSDYQLPYVLGSAHQGCLPPFPADVFMIPQYGYLTLNDGSQAVGRSSFYCLEYFPSQMLRTGNNFTFSYTFEDVPFHSSYAHSQSLDRLMNPLIDQYLYYLSKTINGSGQNQQTLKFSQGGPNTMANQAKNWLPGPCYRQQRVSTTTGQNNNSNFAWTAGTKYHLNGRNSLMNPGPAMASHKEGEDRFFPLSGSLIFGKQNAARDNADYSDVMLTSEEEIKTTNPVATEEYGIVADNLQQQNTAPQIGTVNSQGALPGMVWQNRDVYLQGPIWAKIPHTDGNFHPSPLMGGFGLKHPPPQILIKNTPVPADPPTTFNQSKLNSFITQYSTGQVSVEIEWELQKENSKRWNPEIQYTSNYYKSTSVDFAVNTEGVYSEPHPIGTRYLTRPL

SEQ ID NO: 87 - protein, 8 aa, synthetic construct
  REGION 1..8: note = AAV214AB VR-1 amino acid
SSTSGGSS

SEQ ID NO: 88 - DNA, 6719 bp, synthetic construct
  misc_feature 1..6719: note = pA-CF1
  source 1..6719: mol_type = other DNA
tcctgcaggcagctgcgcgctcgctcgctcactgaggccgcccgggcaaagcccgggcgtcgggcgacctttggtcgcccggcctcagtgagcgagcgagcgcgcagagagggagtggccaactccatcactaggggttcctgcggccgcatggaggcggtactatgtagatgagaattcaggagcaaactgggaaaagcaactgcttccaaatatttgtgatttttacagtgtagttttggaaaaactcttagcctaccaattcttctaagtgttttaaaatgtgggagccagtacacatgaagttatagagtgttttaatgaggcttaaatatttaccgtaactatgaaatgctacgcatatcatgctgttcaggctccgtggccacgcaactcataccggtagtactcgccaccatgcagagaagccccctggagaaggcctctgtggtgagcaagctgttcttcagctggaccagacccatcctgagaaagggctacagacagagactggagctgtctgacatctaccagatcccctctgtggactctgctgacaacctgtctgagaagctggagagagagtgggacagagagctggccagcaagaagaaccccaagctgatcaatgccctgagaagatgcttcttctggagattcatgttctatggcatcttcctgtacctgggggaggtgaccaaggctgtgcagcccctgctgctgggcagaatcattgccagctatgaccctgacaacaaggaggagagaagcattgccatctacctgggcattggcctgtgcctgctgttcattgtgagaaccctgctgctgcaccctgccatctttggcctgcaccacattggcatgcagatgagaattgccatgttcagcctgatctacaagaagaccctgaagctgagcagcagagtgctggacaagatcagcattggccagctggtgagcctgctgagcaacaacctgaacaagtttgatgagggcctggccctggcccactttgtgtggattgcccccctgcaggtggccctgctgatgggcctgatctgggagctgctgcaggcctctgccttctgtggcctgggcttcctgattgtgctggccctgttccaggctggcctgggcagaatgatgatgaagtacagagaccagagagctggcaagatctctgagagactggtgatcacctctgagatgattgagaacatccagtctgtgaaggcctactgctgggaggaggccatggagaagatgattgagaacctgagacagacagagctgaagctgaccagaaaggctgcctatgtgagatacttcaacagctctgccttcttcttctctggcttctttgtggtgttcctgtctgtgctgccctatgccctgatcaagggcatcatcctgagaaagatcttcaccaccatcagcttctgcattgtgctgagaatggctgtgaccagacagttcccctgggctgtgcagacctggtatgacagcctgggggccatcaacaagatccaggacttcctgcagaagcaggagtacaagaccctggagtacaacctgaccaccacagaggtggtgatggagaatgtgacagccttctgggaggagggctttggggagctgtttgagaaggccaagcagaacaacaacaacagaaagaccagcaatggggatgacagcctgttcttcagcaacttcagcctgctgggcacccctgtgctgaaggacatcaacttcaagattgagagaggccagctgctggctgtggctggcagcacaggggctggcaagaccagcctgctgatgatgatcatgggggagctggagccctctgagggcaagatcaagcactctggcagaatcagcttctgcagccagttcagctggatcatgcctggcaccatcaaggagaacatcatctttggggtgagctatgatgagtacagatacagatctgtgatcaaggcctgccagctggaggaggacatcagcaagtttgctgagaaggacaacattgtgctgggggaggggggcatcaccctgtctgggggccagagagccagaatcagcctggccagagctgtgtacaaggatgctgacctgtacctgctggacagcccctttggctacctggatgtgctgacagagaaggagatctttgagagctgtgtgtgcaagctgatggccaacaagaccagaatcctggtgaccagcaagatggagcacctgaagaaggctgacaagatcctgatcctgcatgagggcagcagctacttctatggcaccttctctgagctgcagaacctgcagcctgacttcagcagcaagctgatgggctgtgacagctttgaccagttctctgctgagagaagaaacagcatcctgacagagaccctgcacagattcagcctggagggggatgcccctgtgagctggacagagaccaagaagcagagcttcaagcagacaggggagtttggggagaagagaaagaacagcatcctgaaccccatcaacagcaccctgcaggccagaagaagacagtctgtgctgaacctgatgacccactctgtgaaccagggccagaacatccacagaaagaccacagccagcaccagaaaggtgagcctggccccccaggccaacctgacagagctggacatctacagcagaagactgagccaggagacaggcctggagatctctgaggagatcaatgaggaggacctgaaggagtgcttctttgatgacatggagagcatccctgctgtgaccacctggaacacctacctgagatacatcacagtgcacaagagcctgatctttgtgctgatctggtgcctggtgatcttcctggctgaggtggctgccagcctggtggtgctgtggctgctgggcaacacccccctgcaggacaagggcaacagcacccacagcagaaacaacagctatgctgtgatcatcaccagcaccagcagctactatgtgttctacatctatgtgggggtggctgacaccctgctggccatgggcttcttcagaggcctgcccctggtgcacaccctgatcacagtgagcaagatcctgcaccacaagatgctgcactctgtgctgcaggcccccatgagcaccctgaacaccctgaaggctgggggcatcctgaacagattcagcaaggacattgccatcctggatgacctgctgcccctgaccatctttgacttcatccagctgctgctgattgtgattggggccattgctgtggtggctgtgctgcagccctacatctttgtggccacagtgcctgtgattgtggccttcatcatgctgagagcctacttcctgcagaccagccagcagctgaagcagctggagtctgagggcagaagccccatcttcacccacctggtgaccagcctgaagggcctgtggaccctgagagcctttggcagacagccctactttgagaccctgttccacaaggccctgaacctgcacacagccaactggttcctgtacctgagcaccctgagatggttccagatgagaattgagatgatctttgtgatcttcttcattgctgtgaccttcatcagcatcctgaccacaggggagggggagggcagagtgggcatcatcctgaccctggccatgaacatcatgagcaccctgcagtgggctgtgaacagcagcattgatgtggacagcctgatgagatctgtgagcagagtgttcaagttcattgacatgcccacagagggcaagcccaccaagagcaccaagccctacaagaatggccagctgagcaaggtgatgatcattgagaacagccatgtgaagaaggatgacatctggccctctgggggccagatgacagtgaaggacctgacagccaagtacacagaggggggcaatgccatcctggagaacatcagcttcagcatcagccctggccagagagtgggcctgctgggcagaacaggctctggcaagagcaccctgctgtctgccttcctgagactgctgaacacagagggggagatccagattgatggggtgagctgggacagcatcaccctgcagcagtggagaaaggcctttggggtgatcccccagaaggtgttcatcttctctggcaccttcagaaagaacctggacccctatgagcagtggtctgaccaggagatctggaaggtggctgatgaggtgggcctgagatctgtgattgagcagttccctggcaagctggactttgtgctggtggatgggggctgtgtgctgagccatggccacaagcagctgatgtgcctggccagatctgtgctgagcaaggccaagatcctgctgctggatgagccctctgcccacctggaccctgtgacctaccagatcatcagaagaaccctgaagcaggcctttgctgactgcacagtgatcctgtgtgagcacagaattgaggccatgctggagtgccagcagttcctggtgattgaggagaacaaggtgagacagtatgacagcatccagaagctgctgaatgagagaagcctgttcagacaggccatcagcccctctgacagagtgaagctgttcccccacagaaacagcagcaagtgcaagagcaagccccagattgctgccctgaaggaggagaccgaggaggaggtgcaggacaccagactgtaaataaaatacgaaatggatctgaggaacccctagtgatggagttggccactccctctctgcgcgctcgctcgctcactgaggccgggcgaccaaaggtcgcccgacgcccgggctttgcccgggcggcctcagtgagcgagcgagcgcgcagagagggagtggccaattaattaaggcgatgaacggtaatcgtaaaactagcatgtcaatcatatgtaccccggttgataatcagaaaagccccaaaaacaggaagattgtataagcattaattaatttaaatacatggacatgtcagaattggttaattggttgtaacactgacccctatttgtttatttttctaaatacattcaaatatgtatccgctcatgagacaataaccctgataaatgcttcaataatattgaaaaaggaagaatatgagccatattcaacgggaaacgtcgaggccgcgattaaattccaacatggatgctgatttatatgggtataaatgggctcgcgataatgtcgggcaatcaggtgcgacaatctatcgcttgtatgggaagcccgatgcgccagagttgtttctgaaacatggcaaaggtagcgttgccaatgatgttacagatgagatggtcagactaaactggctgacggaatttatgccacttccgaccatcaagcattttatccgtactcctgatgatgcatggttactcaccactgcgatccccggaaaaacagcgttccaggtattagaagaatatcctgattcaggtgaaaatattgttgatgcgctggcagtgttcctgcgccggttgcactcgattcctgtttgtaattgtccttttaacagcgatcgcgtatttcgcctcgctcaggcgcaatcacgaatgaataacggtttggttgatgcgagtgattttgatgacgagcgtaatggctggcctgttgaacaagtctggaaagaaatgcataaacttttgccattctcaccggattcagtcgtcactcatggtgatttctcacttgataaccttatttttgacgaggggaaattaataggttgtattgatgttggacgagtcggaatcgcagaccgataccaggatcttgccatcctatggaactgcctcggtgagttttctccttcattacagaaacggctttttcaaaaatatggtattgataatcctgatatgaataaattgcagtttcatttgatgctcgatgagtttttctaaaagcagagcattacgctgacttgacgggacggcgcaagctcatgaccaaaatcccttaacgtgagttacgcgcgcgtcgttccactgagcgtcagaccccgtagaaaagatcaaaggatcttcttgagatcctttttttctgcgcgtaatctgctgcttgcaaacaaaaaaaccaccgctaccagcggtggtttgtttgccggatcaagagctaccaactctttttccgaaggtaactggcttcagcagagcgcagataccaaatactgttcttctagtgtagccgtagttagcccaccacttcaagaactctgtagcaccgcctacatacctcgctctgctaatcctgttaccagtggctgctgccagtggcgataagtcgtgtcttaccgggttggactcaagacgatagttaccggataaggcgcagcggtcgggctgaacggggggttcgtgcacacagcccagcttggagcgaacgacctacaccgaactgagatacctacagcgtgagctatgagaaagcgccacgcttcccgaagggagaaaggcggacaggtatccggtaagcggcagggtcggaacaggagagcgcacgagggagcttccagggggaaacgcctggtatctttatagtcctgtcgggtttcgccacctctgacttgagcgtcgatttttgtgatgctcgtcaggggggcggagcctatggaaaaacgccagcaacgcggcctttttacggttcctggccttttgctggccttttgctcacatgtttaaaccatg

SEQ ID NO: 89 - DNA, 6751 bp, synthetic construct
  misc_feature 1..6751: note = pA-CF3
  source 1..6751: mol_type = other DNA
tcctgcaggcagctgcgcgctcgctcgctcactgaggccgcccgggcaaagcccgggcgtcgggcgacctttggtcgcccggcctcagtgagcgagcgagcgcgcagagagggagtggccaactccatcactaggggttcctgcggccgcatggaggcggtactatgtagatgagaattcaggagcaaactgggaaaagcaactgcttccaaatatttgtgatttttacagtgtagttttggaaaaactcttagcctaccaattcttctaagtgttttaaaatgtgggagccagtacacatgaagttatagagtgttttaatgaggcttaaatatttaccgtaactatgaaatgctacgcatatcatgctgttcaggctccgtggccacgcaactcataccggtagtactcgccaccatgcagagaagccccctggagaaggcctctgtggtgagcaagctgttcttcagctggaccagacccatcctgagaaagggctacagacagagactggagctgtctgacatctaccagatcccctctgtggactctgctgacaacctgtctgagaagctggagagagagtgggacagagagctggccagcaagaagaaccccaagctgatcaatgccctgagaagatgcttcttctggagattcatgttctatggcatcttcctgtacctgggggaggtgaccaaggctgtgcagcccctgctgctgggcagaatcattgccagctatgaccctgacaacaaggaggagagaagcattgccatctacctgggcattggcctgtgcctgctgttcattgtgagaaccctgctgctgcaccctgccatctttggcctgcaccacattggcatgcagatgagaattgccatgttcagcctgatctacaagaagaccctgaagctgagcagcagagtgctggacaagatcagcattggccagctggtgagcctgctgagcaacaacctgaacaagtttgatgagggcctggccctggcccactttgtgtggattgcccccctgcaggtggccctgctgatgggcctgatctgggagctgctgcaggcctctgccttctgtggcctgggcttcctgattgtgctggccctgttccaggctggcctgggcagaatgatgatgaagtacagagaccagagagctggcaagatctctgagagactggtgatcacctctgagatgattgagaacatccagtctgtgaaggcctactgctgggaggaggccatggagaagatgattgagaacctgagacagacagagctgaagctgaccagaaaggctgcctatgtgagatacttcaacagctctgccttcttcttctctggcttctttgtggtgttcctgtctgtgctgccctatgccctgatcaagggcatcatcctgagaaagatcttcaccaccatcagcttctgcattgtgctgagaatggctgtgaccagacagttcccctgggctgtgcagacctggtatgacagcctgggggccatcaacaagatccaggacttcctgcagaagcaggagtacaagaccctggagtacaacctgaccaccacagaggtggtgatggagaatgtgacagccttctgggaggagggctttggggagctgtttgagaaggccaagcagaacaacaacaacagaaagaccagcaatggggatgacagcctgttcttcagcaacttcagcctgctgggcacccctgtgctgaaggacatcaacttcaagattgagagaggccagctgctggctgtggctggcagcacaggggctggcaagaccagcctgctgatgatgatcatgggggagctggagccctctgagggcaagatcaagcactctggcagaatcagcttctgcagccagttcagctggatcatgcctggcaccatcaaggagaacatcatctttggggtgagctatgatgagtacagatacagatctgtgatcaaggcctgccagctggaggaggacatcagcaagtttgctgagaaggacaacattgtgctgggggaggggggcatcaccctgtctgggggccagagagccagaatcagcctggccagagctgtgtacaaggatgctgacctgtacctgctggacagcccctttggctacctggatgtgctgacagagaaggagatctttgagagctgtgtgtgcaagctgatggccaacaagaccagaatcctggtgaccagcaagatggagcacctgaagaaggctgacaagatcctgatcctgcatgagggcagcagctacttctatggcaccttctctgagctgcagaacctgcagcctgacttcagcagcaagctgatgggctgtgacagctttgaccagttctctgctgagagaagaaacagcatcctgacagagaccctgcacagattcagcctggagggggatgcccctgtgagctggacagagaccaagaagcagagcttcaagcagacaggggagtttggggagaagagaaagaacagcatcctgaaccccatcaacagcaccctgcaggccagaagaagacagtctgtgctgaacctgatgacccactctgtgaaccagggccagaacatccacagaaagaccacagccagcaccagaaaggtgagcctggccccccaggccaacctgacagagctggacatctacagcagaagactgagccaggagacaggcctggagatctctgaggagatcaatgaggaggacctgaaggagtgcttctttgatgacatggagagcatccctgctgtgaccacctggaacacctacctgagatacatcacagtgcacaagagcctgatctttgtgctgatctggtgcctggtgatcttcctggctgaggtggctgccagcctggtggtgctgtggctgctgggcaacacccccctgcaggacaagggcaacagcacccacagcagaaacaacagctatgctgtgatcatcaccagcaccagcagctactatgtgttctacatctatgtgggggtggctgacaccctgctggccatgggcttcttcagaggcctgcccctggtgcacaccctgatcacagtgagcaagatcctgcaccacaagatgctgcactctgtgctgcaggcccccatgagcaccctgaacaccctgaaggctgggggcatcctgaacagattcagcaaggacattgccatcctggatgacctgctgcccctgaccatctttgacttcatccagctgctgctgattgtgattggggccattgctgtggtggctgtgctgcagccctacatctttgtggccacagtgcctgtgattgtggccttcatcatgctgagagcctacttcctgcagaccagccagcagctgaagcagctggagtctgagggcagaagccccatcttcacccacctggtgaccagcctgaagggcctgtggaccctgagagcctttggcagacagccctactttgagaccctgttccacaaggccctgaacctgcacacagccaactggttcctgtacctgagcaccctgagatggttccagatgagaattgagatgatctttgtgatcttcttcattgctgtgaccttcatcagcatcctgaccacaggggagggggagggcagagtgggcatcatcctgaccctggccatgaacatcatgagcaccctgcagtgggctgtgaacagcagcattgatgtggacagcctgatgagatctgtgagcagagtgttcaagttcattgacatgcccacagagggcaagcccaccaagagcaccaagccctacaagaatggccagctgagcaaggtgatgatcattgagaacagccatgtgaagaaggatgacatctggccctctgggggccagatgacagtgaaggacctgacagccaagtacacagaggggggcaatgccatcctggagaacatcagcttcagcatcagccctggccagagagtgggcctgctgggcagaacaggctctggcaagagcaccctgctgtctgccttcctgagactgctgaacacagagggggagatccagattgatggggtgagctgggacagcatcaccctgcagcagtggagaaaggcctttggggtgatcccccagaaggtgttcatcttctctggcaccttcagaaagaacctggacccctatgagcagtggtctgaccaggagatctggaaggtggctgatgaggtgggcctgagatctgtgattgagcagttccctggcaagctggactttgtgctggtggatgggggctgtgtgctgagccatggccacaagcagctgatgtgcctggccagatctgtgctgagcaaggccaagatcctgctgctggatgagccctctgcccacctggaccctgtgacctaccagatcatcagaagaaccctgaagcaggcctttgctgactgcacagtgatcctgtgtgagcacagaattgaggccatgctggagtgccagcagttcctggtgattgaggagaacaaggtgagacagtatgacagcatccagaagctgctgaatgagagaagcctgttcagacaggccatcagcccctctgacagagtgaagctgttcccccacagaaacagcagcaagtgcaagagcaagccccagattgctgccctgaaggaggagaccgaggaggaggtgcaggacaccagactgtaaataaatatctttattttcattacatctgtgtgttggttttttgtgtggatctgaggaacccctagtgatggagttggccactccctctctgcgcgctcgctcgctcactgaggccgggcgaccaaaggtcgcccgacgcccgggctttgcccgggcggcctcagtgagcgagcgagcgcgcagagagggagtggccaattaattaaggcgatgaacggtaatcgtaaaactagcatgtcaatcatatgtaccccggttgataatcagaaaagccccaaaaacaggaagattgtataagcattaattaatttaaatacatggacatgtcagaattggttaattggttgtaacactgacccctatttgtttatttttctaaatacattcaaatatgtatccgctcatgagacaataaccctgataaatgcttcaataatattgaaaaaggaagaatatgagccatattcaacgggaaacgtcgaggccgcgattaaattccaacatggatgctgatttatatgggtataaatgggctcgcgataatgtcgggcaatcaggtgcgacaatctatcgcttgtatgggaagcccgatgcgccagagttgtttctgaaacatggcaaaggtagcgttgccaatgatgttacagatgagatggtcagactaaactggctgacggaatttatgccacttccgaccatcaagcattttatccgtactcctgatgatgcatggttactcaccactgcgatccccggaaaaacagcgttccaggtattagaagaatatcctgattcaggtgaaaatattgttgatgcgctggcagtgttcctgcgccggttgcactcgattcctgtttgtaattgtccttttaacagcgatcgcgtatttcgcctcgctcaggcgcaatcacgaatgaataacggtttggttgatgcgagtgattttgatgacgagcgtaatggctggcctgttgaacaagtctggaaagaaatgcataaacttttgccattctcaccggattcagtcgtcactcatggtgatttctcacttgataaccttatttttgacgaggggaaattaataggttgtattgatgttggacgagtcggaatcgcagaccgataccaggatcttgccatcctatggaactgcctcggtgagttttctccttcattacagaaacggctttttcaaaaatatggtattgataatcctgatatgaataaattgcagtttcatttgatgctcgatgagtttttctaaaagcagagcattacgctgacttgacgggacggcgcaagctcatgaccaaaatcccttaacgtgagttacgcgcgcgtcgttccactgagcgtcagaccccgtagaaaagatcaaaggatcttcttgagatcctttttttctgcgcgtaatctgctgcttgcaaacaaaaaaaccaccgctaccagcggtggtttgtttgccggatcaagagctaccaactctttttccgaaggtaactggcttcagcagagcgcagataccaaatactgttcttctagtgtagccgtagttagcccaccacttcaagaactctgtagcaccgcctacatacctcgctctgctaatcctgttaccagtggctgctgccagtggcgataagtcgtgtcttaccgggttggactcaagacgatagttaccggataaggcgcagcggtcgggctgaacggggggttcgtgcacacagcccagcttggagcgaacgacctacaccgaactgagatacctacagcgtgagctatgagaaagcgccacgcttcccgaagggagaaaggcggacaggtatccggtaagcggcagggtcggaacaggagagcgcacgagggagcttccagggggaaacgcctggtatctttatagtcctgtcgggtttcgccacctctgacttgagcgtcgatttttgtgatgctcgtcaggggggcggagcctatggaaaaacgccagcaacgcggcctttttacggttcctggccttttgctggccttttgctcacatgtttaaaccatg

SEQ ID NO: 90 - DNA, 6603 bp, synthetic construct
  misc_feature 1..6603: note = pA-CF5
  source 1..6603: mol_type = other DNA
tcctgcaggcagctgcgcgctcgctcgctcactgaggccgcccgggcaaagcccgggcgtcgggcgacctttggtcgcccggcctcagtgagcgagcgagcgcgcagagagggagtggccaactccatcactaggggttcctgcggccgcaatatttgcatgtcgctatgtgttctgggaaatcaccataaacgtgaaatgtctttggatttgggaatcttcgaagttctgtatgagaccacagatctccaccggtagtactcgccaccatgcagagaagccccctggagaaggcctctgtggtgagcaagctgttcttcagctggaccagacccatcctgagaaagggctacagacagagactggagctgtctgacatctaccagatcccctctgtggactctgctgacaacctgtctgagaagctggagagagagtgggacagagagctggccagcaagaagaaccccaagctgatcaatgccctgagaagatgcttcttctggagattcatgttctatggcatcttcctgtacctgggggaggtgaccaaggctgtgcagcccctgctgctgggcagaatcattgccagctatgaccctgacaacaaggaggagagaagcattgccatctacctgggcattggcctgtgcctgctgttcattgtgagaaccctgctgctgcaccctgccatctttggcctgcaccacattggcatgcagatgagaattgccatgttcagcctgatctacaagaagaccctgaagctgagcagcagagtgctggacaagatcagcattggccagctggtgagcctgctgagcaacaacctgaacaagtttgatgagggcctggccctggcccactttgtgtggattgcccccctgcaggtggccctgctgatgggcctgatctgggagctgctgcaggcctctgccttctgtggcctgggcttcctgattgtgctggccctgttccaggctggcctgggcagaatgatgatgaagtacagagaccagagagctggcaagatctctgagagactggtgatcacctctgagatgattgagaacatccagtctgtgaaggcctactgctgggaggaggccatggagaagatgattgagaacctgagacagacagagctgaagctgaccagaaaggctgcctatgtgagatacttcaacagctctgccttcttcttctctggcttctttgtggtgttcctgtctgtgctgccctatgccctgatcaagggcatcatcctgagaaagatcttcaccaccatcagcttctgcattgtgctgagaatggctgtgaccagacagttcccctgggctgtgcagacctggtatgacagcctgggggccatcaacaagatccaggacttcctgcagaagcaggagtacaagaccctggagtacaacctgaccaccacagaggtggtgatggagaatgtgacagccttctgggaggagggctttggggagctgtttgagaaggccaagcagaacaacaacaacagaaagaccagcaatggggatgacagcctgttcttcagcaacttcagcctgctgggcacccctgtgctgaaggacatcaacttcaagattgagagaggccagctgctggctgtggctggcagcacaggggctggcaagaccagcctgctgatgatgatcatgggggagctggagccctctgagggcaagatcaagcactctggcagaatcagcttctgcagccagttcagctggatcatgcctggcaccatcaaggagaacatcatctttggggtgagctatgatgagtacagatacagatctgtgatcaaggcctgccagctggaggaggacatcagcaagtttgctgagaaggacaacattgtgctgggggaggggggcatcaccctgtctgggggccagagagccagaatcagcctggccagagctgtgtacaaggatgctgacctgtacctgctggacagcccctttggctacctggatgtgctgacagagaaggagatctttgagagctgtgtgtgcaagctgatggccaacaagaccagaatcctggtgaccagcaagatggagcacctgaagaaggctgacaagatcctgatcctgcatgagggcagcagctacttctatggcaccttctctgagctgcagaacctgcagcctgacttcagcagcaagctgatgggctgtgacagctttgaccagttctctgctgagagaagaaacagcatcctgacagagaccctgcacagattcagcctggagggggatgcccctgtgagctggacagagaccaagaagcagagcttcaagcagacaggggagtttggggagaagagaaagaacagcatcctgaaccccatcaacagcaccctgcaggccagaagaagacagtctgtgctgaacctgatgacccactctgtgaaccagggccagaacatccacagaaagaccacagccagcaccagaaaggtgagcctggccccccaggccaacctgacagagctggacatctacagcagaagactgagccaggagacaggcctggagatctctgaggagatcaatgaggaggacctgaaggagtgcttctttgatgacatggagagcatccctgctgtgaccacctggaacacctacctgagatacatcacagtgcacaagagcctgatctttgtgctgatctggtgcctggtgatcttcctggctgaggtggctgccagcctggtggtgctgtggctgctgggcaacacccccctgcaggacaagggcaacagcacccacagcagaaacaacagctatgctgtgatcatcaccagcaccagcagctactatgtgttctacatctatgtgggggtggctgacaccctgctggccatgggcttcttcagaggcctgcccctggtgcacaccctgatcacagtgagcaagatcctgcaccacaagatgctgcactctgtgctgcaggcccccatgagcaccctgaacaccctgaaggctgggggcatcctgaacagattcagcaaggacattgccatcctggatgacctgctgcccctgaccatctttgacttcatccagctgctgctgattgtgattggggccattgctgtggtggctgtgctgcagccctacatctttgtggccacagtgcctgtgattgtggccttcatcatgctgagagcctacttcctgcagaccagccagcagctgaagcagctggagtctgagggcagaagccccatcttcacccacctggtgaccagcctgaagggcctgtggaccctgagagcctttggcagacagccctactttgagaccctgttccacaaggccctgaacctgcacacagccaactggttcctgtacctgagcaccctgagatggttccagatgagaattgagatgatctttgtgatcttcttcattgctgtgaccttcatcagcatcctgaccacaggggagggggagggcagagtgggcatcatcctgaccctggccatgaacatcatgagcaccctgcagtgggctgtgaacagcagcattgatgtggacagcctgatgagatctgtgagcagagtgttcaagttcattgacatgcccacagagggcaagcccaccaagagcaccaagccctacaagaatggccagctgagcaaggtgatgatcattgagaacagccatgtgaagaaggatgacatctggccctctgggggccagatgacagtgaaggacctgacagccaagtacacagaggggggcaatgccatcctggagaacatcagcttcagcatcagccctggccagagagtgggcctgctgggcagaacaggctctggcaagagcaccctgctgtctgccttcctgagactgctgaacacagagggggagatccagattgatggggtgagctgggacagcatcaccctgcagcagtggagaaaggcctttggggtgatcccccagaaggtgttcatcttctctggcaccttcagaaagaacctggacccctatgagcagtggtctgaccaggagatctggaaggtggctgatgaggtgggcctgagatctgtgattgagcagttccctggcaagctggactttgtgctggtggatgggggctgtgtgctgagccatggccacaagcagctgatgtgcctggccagatctgtgctgagcaaggccaagatcctgctgctggatgagccctctgcccacctggaccctgtgacctaccagatcatcagaagaaccctgaagcaggcctttgctgactgcacagtgatcctgtgtgagcacagaattgaggccatgctggagtgccagcagttcctggtgattgaggagaacaaggtgagacagtatgacagcatccagaagctgctgaatgagagaagcctgttcagacaggccatcagcccctctgacagagtgaagctgttcccccacagaaacagcagcaagtgcaagagcaagccccagattgctgccctgaaggaggagaccgaggaggaggtgcaggacaccagactgtaaataaatatctttattttcattacatctgtgtgttggttttttgtgtggatctgaggaacccctagtgatggagttggccactccctctctgcgcgctcgctcgctcactgaggccgggcgaccaaaggtcgcccgacgcccgggctttgcccgggcggcctcagtgagcgagcgagcgcgcagagagggagtggccaattaattaaggcgatgaacggtaatcgtaaaactagcatgtcaatcatatgtaccccggttgataatcagaaaagccccaaaaacaggaagattgtataagcattaattaatttaaatacatggacatgtcagaattggttaattggttgtaacactgacccctatttgtttatttttctaaatacattcaaatatgtatccgctcatgagacaataaccctgataaatgcttcaataatattgaaaaaggaagaatatgagccatattcaacgggaaacgtcgaggccgcgattaaattccaacatggatgctgatttatatgggtataaatgggctcgcgataatgtcgggcaatcaggtgcgacaatctatcgcttgtatgggaagcccgatgcgccagagttgtttctgaaacatggcaaaggtagcgttgccaatgatgttacagatgagatggtcagactaaactggctgacggaatttatgccacttccgaccatcaagcattttatccgtactcctgatgatgcatggttactcaccactgcgatccccggaaaaacagcgttccaggtattagaagaatatcctgattcaggtgaaaatattgttgatgcgctggcagtgttcctgcgccggttgcactcgattcctgtttgtaattgtccttttaacagcgatcgcgtatttcgcctcgctcaggcgcaatcacgaatgaataacggtttggttgatgcgagtgattttgatgacgagcgtaatggctggcctgttgaacaagtctggaaagaaatgcataaacttttgccattctcaccggattcagtcgtcactcatggtgatttctcacttgataaccttatttttgacgaggggaaattaataggttgtattgatgttggacgagtcggaatcgcagaccgataccaggatcttgccatcctatggaactgcctcggtgagttttctccttcattacagaaacggctttttcaaaaatatggtattgataatcctgatatgaataaattgcagtttcatttgatgctcgatgagtttttctaaaagcagagcattacgctgacttgacgggacggcgcaagctcatgaccaaaatcccttaacgtgagttacgcgcgcgtcgttccactgagcgtcagaccccgtagaaaagatcaaaggatcttcttgagatcctttttttctgcgcgtaatctgctgcttgcaaacaaaaaaaccaccgctaccagcggtggtttgtttgccggatcaagagctaccaactctttttccgaaggtaactggcttcagcagagcgcagataccaaatactgttcttctagtgtagccgtagttagcccaccacttcaagaactctgtagcaccgcctacatacctcgctctgctaatcctgttaccagtggctgctgccagtggcgataagtcgtgtcttaccgggttggactcaagacgatagttaccggataaggcgcagcggtcgggctgaacggggggttcgtgcacacagcccagcttggagcgaacgacctacaccgaactgagatacctacagcgtgagctatgagaaagcgccacgcttcccgaagggagaaaggcggacaggtatccggtaagcggcagggtcggaacaggagagcgcacgagggagcttccagggggaaacgcctggtatctttatagtcctgtcgggtttcgccacctctgacttgagcgtcgatttttgtgatgctcgtcaggggggcggagcctatggaaaaacgccagcaacgcggcctttttacggttcctggccttttgctggccttttgctcacatgtttaaaccatg

SEQ ID NO: 91 - DNA, 7519 bp, synthetic construct
  misc_feature 1..7519: note = pA-CF7
  source 1..7519: mol_type = other DNA
tcctgcaggcagctgcgcgctcgctcgctcactgaggccgcccgggcaaagcccgggcgtcgggcgacctttggtcgcccggcctcagtgagcgagcgagcgcgcagagagggagtggccaactccatcactaggggttcctgcggccgcaatatttgcatgtcgctatgtgttctgggaaatcaccataaacgtgaaatgtctttggatttgggaatcttcgaagttctgtatgagaccacagatctccaccggtagtactcgccaccatgcagagaagccccctggagaaggcctctgtggtgagcaagctgttcttcccccctggagaaggcctctgtggtgagcaagctgttcttcagctggaccagacccatcctgagaaagggctacagacagagactggagctgtctgacatctaccagatcccctctgtggactctgctgacaacctgtctgagaagctggagagagagtgggacagagagctggccagcaagaagaaccccaagctgatcaatgccctgagaagatgcttcttctggagattcatgttctatggcatcttcctgtacctgggggaggtgaccaaggctgtgcagcccctgctgctgggcagaatcattgccagctatgacccagcccctgctgctgggcagaatcattgccagctatgaccctgacaacaaggaggagagaagcattgccatctacctgggcattggcctgtgcctgctgttcattgtgagaaccctgctgctgcaccctgccatctttggcctgcaccacattggcatgcagatgagaattgccatgttcagcctgatctacaagaagaccctgaagctgagcagcagagtgctggacaagatcagcattggccagctggtgagcctgctgagcaacaacctgaacaagtttgatgagggcctggccctggcccactttgtgtggattgcttgatgagggcctggccctggcccactttgtgtggattgcccccctgcaggtggccctgctgatgggcctgatctgggagctgctgcaggcctctgccttctgtggcctgggcttcctgattgtgctggccctgttccaggctggcctgggcagaatgatgatgaagtacagagaccagagagctggcaagatctctgagagactggtgatcacctctgagatgattgagaacatccagtctgtgaaggcctactgctgggaggaggccatggagaagatgattgagaacctgagacagacagagctgaagctgaccagaaaggctgcctatgtgagatacttcaacagctctgccttcttcttctctggcttctttgtggtgttcctgtctgtgctgcctctgccttcttcttctctggcttctttgtggtgttcctgtctgtgctgccctatgccctgatcaagggcatcatcctgagaaagatcttcaccaccatcagcttctgcattgtgctgagaatggctgtgaccagacagttcccctgggctgtgcagacctggtatgacagcctgggggccatcaacaagatccaggacttcctgcagaagcaggagtacaagaccctggagtacaacctgaccaccacagaggtggtgatggagaatgtgacagccttctgggaggagggctttggggagctgtttgagaaggccaagcagaacaacaacaacagaaagaccagcaatggggatgacagcctgttcttcagcaacttcagcctgctgggcacccctgtgcggatgacagcctgttcttcagcaacttcagcctgctgggcacccctgtgctgaaggacatcaacttcaagattgagagaggccagctgctggctgtggctggcagcacaggggctggcaagaccagcctgctgatgatgatcatgggggagctggagccctctgagggcaagatcaagcactctggcagaatcagcttctgcagccagttcagctggatcatgcctggcaccatcaaggagaacatcatctttggggtgagctatgatgagtacagatacagatctgtgatcaaggcctgccagctggaggaggacatcaagatctgtgatcaaggcctgccagctggaggaggacatcagcaagtttgctgagaaggacaacattgtgctgggggaggggggcatcaccctgtctgggggccagagagccagaatcagcctggccagagctgtgtacaaggatgctgacctgtacctgctggacagcccctttggctacctggatgtgctgacagagaaggagatctttgagagctgtgtgtgcaagctgatggccaacaagaccagaatcctggtgaccagcaagatggagcacctgaagaaggctgacaagatcctgatcctgcatgagggcagcagagaaggctgacaagatcctgatcctgcatgagggcagcagctacttctatggcaccttctctgagctgcagaacctgcagcctgacttcagcagcaagctgatgggctgtgacagctttgaccagttctctgctgagagaagaaacagcatcctgacagagaccctgcacagattcagcctggagggggatgcccctgtgagctggacagagaccaagaagcagagcttcaagcagacaggggagtttggggagaagagaaagaacagcatcctgaaccccatcaacagcatcagaaagttcagcattgtgcagaagacccatcaacagcatcagaaagttcagcattgtgcagaagacccccctgcagatgaatggcattgaggaggactctgatgagcccctggagagaagactgagcctggtgcctgactctgagcagggggaggccatcctgcccagaatctctgtgatcagcacaggccccaccctgcaggccagaagaagacagtctgtgctgaacctgatgacccactctgtgaaccagggccagaacatccaccactctgtgaaccagggccagaacatccacagaaagaccacagccagcaccagaaaggtgagcctggccccccaggccaacctgacagagctggacatctacagcagaagactgagccaggagacaggcctggagatctctgaggagatcaatgaggaggacctgaaggagtgcttctttgatgacatggagagcatccctgctgtgaccacctggaacacctacctgagatacatcacagtgcacaagagcctgatctttgtgctgatctggtgcctggtgatcttcctggctgaggtggctgccagcctggtggtgcgtgatcttcctggctgaggtggctgccagcctggtggtgctgtggctgctgggcaacacccccctgcaggacaagggcaacagcacccacagcagaaacaacagctatgctgtgatcatcaccagcaccagcagctactatgtgttctacatctatgtgggggtggctgacaccctgctggccatgggcttcttcagaggcctgcccctggtgcacaccctgatcacagtgagcaagatcctgcaccacaagatgctgcactctgtgctgcaggcccccatgagcaccctgaacaccctgaaggctgggggcatcctgaatgagcaccctgaacaccctgaaggctgggggcatcctgaacagattcagcaaggacattgccatcctggatgacctgctgcccctgaccatctttgacttcatccagctgctgctgattgtgattggggccattgctgtggtggctgtgctgcagccctacatctttgtggccacagtgcctgtgattgtggccttcatcatgctgagagcctacttcctgcagaccagccagcagctgaagcagctggagtctgagggcagaagccccatcttcacccacctggtgaccagcctgaagggcctgtggaccctgagagcccctggtgaccagcctgaagggcctgtggaccctgagagcctttggcagacagccctactttgagaccctgttccacaaggccctgaacctgcacacagccaactggttcctgtacctgagcaccctgagatggttccagatgagaattgagatgatctttgtgatcttcttcattgctgtgaccttcatcagcatcctgaccacaggggagggggagggcagagtgggcatcatcctgaccctggccatgaacatcatgagcaccctgcagtgggctgtgaacagcagcattgatgtggacagcctgatgagatctgtgagcagagtgttcaagttcattgacatgcccacagagggcaagcccaccaagagcaccaagccctacaagaatggccagctgcagagggcaagcccaccaagagcaccaagccctacaagaatggccagctgagcaaggtgatgatcattgagaacagccatgtgaagaaggatgacatctggccctctgggggccagatgacagtgaaggacctgacagccaagtacacagaggggggcaatgccatcctggagaacatcagcttcagcatcagccctggccagagagtgggcctgctgggcagaacaggctctggcaagagcaccctgctgtctgccttcctgagactgctgaacacagagggggagatccagattgatggggtgagctgggacagcatcaccctgcagcagtggagaaaggcctttggggtgatcccccagaaggtgttcatcttctctggcaccttcagaaagaacctgtgatcccccagaaggtgttcatcttctctggcaccttcagaaagaacctggacccctatgagcagtggtctgaccaggagatctggaaggtggctgatgaggtgggcctgagatctgtgattgagcagttccctggcaagctggactttgtgctggtggatgggggctgtgtgctgagccatggccacaagcagctgatgtgcctggccagatctgtgctgagcaaggccaagatcctgctgctggatgagccctctgcccacctggaccctgtgacctaccagatcatcagaagaaccctgaagcaggcctttgctgaaccagatcatcagaagaaccctgaagcaggcctttgctgactgcacagtgatcctgtgtgagcacagaattgaggccatgctggagtgccagcagttcctggtgattgaggagaacaaggtgagacagtatgacagcatccagaagctgctgaatgagagaagcctgttcagacaggccatcagcccctctgacagagtgaagctgttcccccacagaaacagcagcaagtgcaagagcaagccccagattgctgccctgaaggaggagaccgaggaggaggtgcaggacaccagactgtaaataaatatctttattttcattacatctgtgtgttggttttttgtgtggatctgaggaacccctagtgatggagttggccactccctctctgcgcgctcatctgaggaacccctagtgatggagttggccactccctctctgcgcgctcgctcgctcactgaggccgggcgaccaaaggtcgcccgacgcccgggctttgcccgggcggcctcagtgagcgagcgagcgcgcagagagggagtggccaattaattaaggcgatgaacggtaatcgtaaaactagcatgtcaatcatatgtaccccggttgataatcagaaaagccccaaaaacaggaagattgtataagcattaattaatttaaatacatggacatgtcagaattggttaattggttgtaacactgacccctatttgtttatttttctaaatacattcaaatatgtatccgctcatgagacaataaccctgataaatgcttcaataatattgaaaaaggaagaatatgagccatattcaacgggaaacgtcgaggccgcgattaaattccaacatggatgctgatttatatgggtataaatgggctcgcgataatgtcgggcaatcaggtgcgacaatctatcgcttgtatgggaagcccgatgcgccagagttgtttcgataatgtcgggcaatcaggtgcgacaatctatcgcttgtatgggaagcccgatgcgccagagttgtttctgaaacatggcaaaggtagcgttgccaatgatgttacagatgagatggtcagactaaactggctgacggaatttatgccacttccgaccatcaagcattttatccgtactcctgatgatgcatggttactcaccactgcgatccccggaaaaacagcgttccaggtattagaagaatatcctgattcaggtgaaaatattgttgatgcgctggcagtgttcctgcgccggttgcactcgattcctgtttgtaattgtccttttaacagcgatcgcgtatttcgcctcgctcaggcgcaatcacgaatgaataacggtttggttgatgcgagtgattttgatgacgagcgtaatggctggcctgttgaacaagtctggaaagaaatgcataaacttttgccattctcaccggattcagtcgtcactcatggtgatttctcacttgataaccttatttttgacgaggggaaattaataggttgtattgatgttggacgagtcggaatcgcagaccgataccaggatcttgccatcctatggaactgcctcggtgagttttctccttcattacagaaacggctttttcaaaaatatggtattgataatcctgatatgaataaattgcagtttcatttgatgctcgatgagtttttctaaaagcagagcattacgctgacttgacgggacggcgcaagctcatgaccaaaatcccttaacgtgagttacgcgcgcgtcgttccactgagcgtcagaccccgtagaaaagatcaaaggatcttcttgagatcctttttttctgcgcgtaatctgctgcttgcaaacaaaaaaaccaccgctaccagcggtggtttgtttgccggatcaagagctaccaactctttttccgaaggtaactggcttcagcagagcgcagataccaaatactgttcttctagtgtagccgtagttagcccaccacttcaagaactctgtagcaccgcctacatacctcgctctgctaatcctgttaccagtggctgctgccagtggcgataagtcgtgtcttaccgggttggactcaagacgatagttaccggataaggcgcagcggtcgggctgaacggggggttcgtgcacacagcccagcttggaccagcttggagcgaacgacctacaccgaactgagatacctacagcgtgagctatgagaaagcgccacgcttcccgaagggagaaaggcggacaggtatccggtaagcggcagggtcggaacaggagagcgcacgagggagcttccagggggaaacgcctggtatctttatagtcctgtcgggtttcgccacctctgacttgagcgtcgatttttgtgatgctcgtcaggggggcggagcctatggaaaaacgccagcaacgcggcctttttacggttcctggccttttgctggccttttgctcacatgtttaaaccatg

SEQ ID NO: 92 - DNA, 11577 bp, synthetic construct
  misc_feature 1..11577: note = pHELPK plasmid DNA
  source 1..11577: mol_type = other DNA
ggtacccaactccatgcttaacagtccccaggtacagcccaccctgcgtcgcaaccaggaacagctctacagcttcctggagcgccactcgccctacttccgcagccacagtgcgcagattaggagcgccacttctttttgtcacttgaaaaacatgtaaaaataatgtactaggagacactttcaataaaggcaaatgtttttatttgtacactctcgggtgattatttaccccccacccttgccgtctgcgccgtttaaaaatcaaaggggttctgccgcgcatcgctatgcgccactggcagggacacgttgcgatactggtgtttagtgctccacttaaactcaggcacaaccatccgcggcagctcggtgaagttttcactccacaggctgcgcaccatcaccaacgcgtttagcaggtcgggcgccgatatcttgaagtcgcagttggggcctccgccctgcgcgcgcgagttgcgatacacagggttgcagcactggaacactatcagcgccgggtggtgcacgctggccagcacgctcttgtcggagatcagatccgcgtccaggtcctccgcgttgctcagggcgaacggagtcaactttggtagctgccttcccaaaaagggtgcatgcccaggctttgagttgcactcgcaccgtagtggcatcagaaggtgaccgtgcccggtctgggcgttaggatacagcgcctgcatgaaagccttgatctgcttaaaagccacctgagcctttgcgccttcagagaagaacatgccgcaagacttgccggaaaactgattggccggacaggccgcgtcatgcacgcagcaccttgcgtcggtgttggagatctgcaccacatttcggccccaccggttcttcacgatcttggccttgctagactgctccttcagcgcgcgctgcccgttttcgctcgtcacatccatttcaatcacgtgctccttatttatcataatgctcccgtgtagacacttaagctcgccttcgatctcagcgcagcggtgcagccacaacgcgcagcccgtgggctcgtggtgcttgtaggttacctctgcaaacgactgcaggtacgcctgcaggaatcgccccatcatcgtcacaaaggtcttgttgctggtgaaggtcagctgcaacccgcggtgctcctcgtttagccaggtcttgcatacggccgccagagcttccacttggtcaggcagtagcttgaagtttgcctttagatcgttatccacgtggtacttgtccatcaacgcgcgcgcagcctccatgcccttctcccacgcagacacgatcggcaggctcagcgggtttatcaccgtgctttcactttccgcttcactggactcttccttttcctcttgcgtccgcataccccgcgccactgggtcgtcttcattcagccgccgcaccgtgcgcttacctcccttgccgtgcttgattagcaccggtgggttgctgaaacccaccatttgtagcgccacatcttctctttcttcctcgctgtccacgatcacctctggggatggcgggcgctcgggcttgggagaggggcgcttctttttctttttggacgcaatggccaaatccgccgtcgaggtcgatggccgcgggctgggtgtgcgcggcaccagcgcatcttgtgacgagtcttcttcgtcctcggactcgagacgccgcctcagccgcttttttgggggcgcgcggggaggcggcggcgacggcgacggggacgacacgtcctccatggttggtggacgtcgcgccgcaccgcgtccgcgctcgggggtggtttcgcgctgctcctcttcccgactggccatttccttctcctataggcagaaaaagatcatggagtcagtcgagaaggaggacagcctaaccgccccctttgagttcgccaccaccgcctccaccgatgccgccaacgcgcctaccaccttccccgtcgaggcacccccgcttgaggaggaggaagtgattatcgagcaggacccaggttttgtaagcgaagacgacgaggatcgctcagtaccaacagaggataaaaagcaagaccaggacgacgcagaggcaaacgaggaacaagtcgggcggggggaccaaaggcatggcgactacctagatgtgggagacgacgtgctgttgaagcatctgcagcgccagtgcgccattatctgcgacgcgttgcaagagcgcagcgatgtgcccctcgccatagcggatgtcagccttgcctacgaacgccacctgttctcaccgcgcgtaccccccaaacgccaagaaaacggcacatgcgagcccaacccgcgcctcaacttctaccccgtatttgccgtgccagaggtgcttgccacctatcacatctttttccaaaactgcaagatacccctatcctgccgtgccaaccgcagccgagcggacaagcagctggccttgcggcagggcgctgtcatacctgatatcgcctcgctcgacgaagtgccaaaaatctttgagggtcttggacgcgacgagaaacgcgcggcaaacgctctgcaacaagaaaacagcgaaaatgaaagtcactgtggagtgctggtggaacttgagggtgacaacgcgcgcctagccgtgctgaaacgcagcatcgaggtcacccactttgcctacccggcacttaacctaccccccaaggttatgagcacagtcatgagcgagctgatcgtgcgccgtgcacgacccctggagagggatgcaaacttgcaagaacaaaccgaggagggcctacccgcagttggcgatgagcagctggcgcgctggcttgagacgcgcgagcctgccgacttggaggagcgacgcaagctaatgatggccgcagtgcttgttaccgtggagcttgagtgcatgcagcggttctttgctgacccggagatgcagcgcaagctagaggaaacgttgcactacacctttcgccagggctacgtgcgccaggcctgcaaaatttccaacgtggagctctgcaacctggtctcctaccttggaattttgcacgaaaaccgcctcgggcaaaacgtgcttcattccacgctcaagggcgaggcgcgccgcgactacgtccgcgactgcgtttacttatttctgtgctacacctggcaaacggccatgggcgtgtggcagcaatgcctggaggagcgcaacctaaaggagctgcagaagctgctaaagcaaaacttgaaggacctatggacggccttcaacgagcgctccgtggccgcgcacctggcggacattatcttccccgaacgcctgcttaaaaccctgcaacagggtctgccagacttcaccagtcaaagcatgttgcaaaactttaggaactttatcctagagcgttcaggaattctgcccgccacctgctgtgcgcttcctagcgactttgtgcccattaagtaccgtgaatgccctccgccgctttggggtcactgctaccttctgcagctagccaactaccttgcctaccactccgacatcatggaagacgtgagcggtgacggcctactggagtgtcactgtcgctgcaacctatgcaccccgcaccgctccctggtctgcaattcgcaactgcttagcgaaagtcaaattatcggtacctttgagctgcagggtccctcgcctgacgaaaagtccgcggctccggggttgaaactcactccggggctgtggacgtcggcttaccttcgcaaatttgtacctgaggactaccacgcccacgagattaggttctacgaagaccaatcccgcccgccaaatgcggagcttaccgcctgcgtcattacccagggccacatccttggccaattgcaagccatcaacaaagcccgccaagagtttctgctacgaaagggacggggggtttacctggacccccagtccggcgaggagctcaacccaatccccccgccgccgcagccctatcagcagccgcgggcccttgcttcccaggatggcacccaaaaagaagctgcagctgccgccgccgccacccacggacgaggaggaatactgggacagtcaggcagaggaggttttggacgaggaggaggagatgatggaagactgggacagcctagacgaagcttccgaggccgaagaggtgtcagacgaaacaccgtcaccctcggtcgcattcccctcgccggcgccccagaaattggcaaccgttcccagcatcgctacaacctccgctcctcaggcgccgccggcactgcctgttcgccgacccaaccgtagatgggacaccactggaaccagggccggtaagtctaagcagccgccgccgttagcccaagagcaacaacagcgccaaggctaccgctcgtggcgcgggcacaagaacgccatagttgcttgcttgcaagactgtgggggcaacatctccttcgcccgccgctttcttctctaccatcacggcgtggccttcccccgtaacatcctgcattactaccgtcatctctacagcccctactgcaccggcggcagcggcagcggcagcaacagcagcggtcacacagaagcaaaggcgaccggatagcaagactctgacaaagcccaagaaatccacagcggcggcagcagcaggaggaggagcgctgcgtctggcgcccaacgaacccgtatcgacccgcgagcttagaaataggatttttcccactctgtatgctatatttcaacaaagcaggggccaagaacaagagctgaaaataaaaaacaggtctctgcgctccctcacccgcagctgcctgtatcacaaaagcgaagatcagcttcggcgcacgctggaagacgcggaggctctcttcagcaaatactgcgcgctgactcttaaggactagtttcgcgccctttctcaaatttaagcgcgaaaactacgtcatctccagcggccacacccggcgccagcacctgtcgtcagcgccattatgagcaaggaaattcccacgccctacatgtggagttaccagccacaaatgggacttgcggctggagctgcccaagactactcaacccgaataaactacatgagcgcgggaccccacatgatatcccgggtcaacggaatccgcgcccaccgaaaccgaattctcctcgaacaggcggctattaccaccacacctcgtaataaccttaatccccgtagttggcccgctgccctggtgtaccaggaaagtcccgctcccaccactgtggtacttcccagagacgcccaggccgaagttcagatgactaactcaggggcgcagcttgcgggcggctttcgtcacagggtgcggtcgcccgggcgttttagggcggagtaacttgcatgtattgggaattgtagtttttttaaaatgggaagtgacgtatcgtgggaaaacggaagtgaagatttgaggaagttgtgggttttttggctttcgtttctgggcgtaggttcgcgtgcggttttctgggtgttttttgtggactttaaccgttacgtcattttttagtcctatatatactcgctctgtacttggccctttttacactgtgactgattgagctggtgccgtgtcgagtggtgttttttaataggtttttttactggtaaggctgactgttatggctgccgctgtggaagcgctgtatgttgttctggagcgggagggtgctattttgcctaggcaggagggtttttcaggtgtttatgtgtttttctctcctattaattttgttatacctcctatgggggctgtaatgttgtctctacgcctgcgggtatgtattcccccgggctatttcggtcgctttttagcactgaccgatgttaaccaacctgatgtgtttaccgagtcttacattatgactccggacatgaccgaggaactgtcggtggtgctttttaatcacggtgaccagtttttttacggtcacgccggcatggccgtagtccgtcttatgcttataagggttgtttttcctgttgtaagacaggcttctaatgtttaaatgtttttttttttgttattttattttgtgtttaatgcaggaacccgcagacatgtttgagagaaaaatggtgtctttttctgtggtggttccggaacttacctgcctttatctgcatgagcatgactacgatgtgcttgcttttttgcgcgaggctttgcctgattttttgagcagcaccttgcattttatatcgccgcccatgcaacaagcttacataggggctacgctggttagcatagctccgagtatgcgtgtcataatcagtgtgggttcttttgtcatggttcctggcggggaagtggccgcgctggtccgtgcagacctgcacgattatgttcagctggccctgcgaagggacctacgggatcgcggtatttttgttaatgttccgcttttgaatcttatacaggtctgtgaggaacctgaatttttgcaatcatgattcgctgcttgaggctgaaggtggagggcgctctggagcagatttttacaatggccggacttaatattcgggatttgcttagagacatattgataaggtggcgagatgaaaattatttgggcatggttgaaggtgctggaatgtttatagaggagattcaccctgaagggtttagcctttacgtccacttggacgtgagggcagtttgccttttggaagccattgtgcaacatcttacaaatgccattatctgttctttggctgtagagtttgaccacgccaccggaggggagcgcgttcacttaatagatcttcattttgaggttttggataatcttttggaataaaaaaaaaaaaacatggttcttccagctcttcccgctcctcccgtgtgtgactcgcagaacgaatgtgtaggttggctgggtgtggcttattctgcggtggtggatgttatcagggcagcggcgcatgaaggagtttacatagaacccgaagccagggggcgcctggatgctttgagagagtggatatactacaactactacacagagcgagctaagcgacgagaccggagacgcagatctgtttgtcacgcccgcacctggttttgcttcaggaaatatgactacgtccggcgttccatttggcatgacactacgaccaacacgatctcggttgtctcggcgcactccgtacagtagggatcgcctacctccttttgagacagagacccgcgctaccatactggaggatcatccgctgctgcccgaatgtaacactttgacaatgcacaacgtgagttacgtgcgaggtcttccctgcagtgtgggatttacgctgattcaggaatgggttgttccctgggatatggttctgacgcgggaggagcttgtaatcctgaggaagtgtatgcacgtgtgcctgtgttgtgccaacattgatatcatgacgagcatgatgatccatggttacgagtcctgggctctccactgtcattgttccagtcccggttccctgcagtgcatagccggcgggcaggttttggccagctggtttaggatggtggtggatggcgccatgtttaatcagaggtttatatggtaccgggaggtggtgaattacaacatgccaaaagaggtaatgtttatgtccagcgtgtttatgaggggtcgccacttaatctacctgcgcttgtggtatgatggccacgtgggttctgtggtccccgccatgagctttggatacagcgccttgcactgtgggattttgaacaatattgtggtgctgtgctgcagttactgtgctgatttaagtgagatcagggtgcgctgctgtgcccggaggacaaggcgtctcatgctgcgggcggtgcgaatcatcgctgaggagaccactgccatgttgtattcctgcaggacggagcggcggcggcagcagtttattcgcgcgctgctgcagcaccaccgccctatcctgatgcacgattatgactctacccccatgtaggcgtggacttccccttcgccgcccgttgagcaaccgcaagttggacagcagcctgtggctcagcagctggacagcgacatgaacttaagcgagctgcccggggagtttattaatatcactgatgagcgtttggctcgacaggaaaccgtgtggaatataacacctaagaatatgtctgttacccatgatatgatgctttttaaggccagccggggagaaaggactgtgtactctgtgtgttgggagggaggtggcaggttgaatactagggttctgtgagtttgattaaggtacggtgatcaatataagctatgtggtggtggggctatactactgaatgaaaaatgacttgaaattttctgcaattgaaaaataaacacgttgaaacataacatgcaacaggttcacgattctttattcctgggcaatgtaggagaaggtgtaagagttggtagcaaaagtttcagtggtgtattttccactttcccaggaccatgtaaaagacatagagtaagtgcttacctcgctagtttctgtggattcactagaatcgatgtaggatgttgcccctcctgacgcggtaggagaaggggagggtgccctgcatgtctgccgctgctcttgctcttgccgctgctgaggaggggggcgcatctgccgcagcaccggatgcatctgggaaaagcaaaaaaggggctcgtccctgtttccggaggaatttgcaagcggggtcttgcatgacggggaggcaaacccccgttcgccgcagtccggccggcccgagactcgaaccgggggtcctgcgactcaacccttggaaaataaccctccggctacagggagcgagccacttaatgctttcgctttccagcctaaccgcttacgccgcgcgcggccagtggccaaaaaagctagcgcagcagccgccgcgcctggaaggaagccaaaaggagcgctcccccgttgtctgacgtcgcacacctgggttcgacacgcgggcggtaaccgcatggatcacggcggacggccggatccggggttcgaaccccggtcgtccgccatgatacccttgcgaatttatccaccagaccacggaagagtgcccgcttacaggctctccttttgcacggtctagagcgtcaacgactgcgcacgcctcaccggccagagcgtcccgaccatggagcactttttgccgctgcgcaacatctggaaccgcgtccgcgactttccgcgcgcctccaccaccgccgccggcatcacctggatgtccaggtacatctacggattacgtcgacgtttaaaccatatgatcagctcactcaaaggcggtaatacggttatccacagaatcaggggataacgcaggaaagaacatgtgagcaaaaggccagcaaaaggccaggaaccgtaaaaaggccgcgttgctggcgtttttccataggctccgcccccctgacgagcatcacaaaaatcgacgctcaagtcagaggtggcgaaacccgacaggactataaagataccaggcgtttccccctggaagctccctcgtgcgctctcctgttccgaccctgccgcttaccggatacctgtccgcctttctcccttcgggaagcgtggcgctttctcatagctcacgctgtaggtatctcagttcggtgtaggtcgttcgctccaagctgggctgtgtgcacgaaccccccgttcagcccgaccgctgcgccttatccggtaactatcgtcttgagtccaacccggtaagacacgacttatcgccactggcagcagccactggtaacaggattagcagagcgaggtatgtaggcggtgctacagagttcttgaagtggtggcctaactacggctacactagaagaacagtatttggtatctgcgctctgctgaagccagttaccttcggaaaaagagttggtagctcttgatccggcaaacaaaccaccgctggtagcggtggtttttttgtttgcaagcagcagattacgcgcagaaaaaaaggatctcaagaagatcctttgatcttttctacggggtctgacgctcagtggaacgaaaactcacgttaagggattttggtcatgagattatcaaaaaggatcttcacctagatccttttaaattaaaaatgaagttttaaatcaatctaaagtatatatgagtaaacttggtctgacagttagaaaaactcatcgagcatcaaatgaaactgcaatttattcatatcaggattatcaataccatatttttgaaaaagccgtttctgtaatgaaggagaaaactcaccgaggcagttccataggatggcaagatcctggtatcggtctgcgattccgactcgtccaacatcaatacaacctattaatttcccctcgtcaaaaataaggttatcaagtgagaaatcaccatgagtgacgactgaatccggtgagaatggcaaaagtttatgcatttctttccagacttgttcaacaggccagccattacgctcgtcatcaaaatcactcgcatcaaccaaaccgttattcattcgtgattgcgcctgagcgagacgaaatacgcgatcgctgttaaaaggacaattacaaacaggaatcgaatgcaaccggcgcaggaacactgccagcgcatcaacaatattttcacctgaatcaggatattcttctaatacctggaatgctgttttcccagggatcgcagtggtgagtaaccatgcatcatcaggagtacggataaaatgcttgatggtcggaagaggcataaattccgtcagccagtttagtctgaccatctcatctgtaacatcattggcaacgctacctttgccatgtttcagaaacaactctggcgcatcgggcttcccatacaatcgatagattgtcgcacctgattgcccgacattatcgcgagcccatttatacccatataaatcagcatccatgttggaatttaatcgcggcctagagcaagacgtttcccgttgaatatggctcatactcttcctttttcaatattattgaagcatttatcagggttattgtctcatgagcggatacatatttgaatgtatttagaaaaataaacaaataggggttccgcgcacatttccccgaaaagtgccacctgacgtctaagaaaccattattatcatgacattaacctataaaaataggcgtatcacgaggccctttcgtctcgcgcgtttcggtgatgacggtgaaaacctctgacacatgcagctcccggagacggtcacagcttgtctgtaagcggatgccgggagcagacaacaacgtcaaagggcgaaaaaccgtctatcagggcgatggcccactacgtgaaccatcaccctaatcaagttttttggggtcgaggtgccgtaaagcactaaatcggaaccctaaagggagcccccgatttagagcttgacggggaaagccggcgaacgtggcgagaaaggaagggaagaaagcgaaaggagcgggcgctagggcgctggcaagtgtagcggtcacgctgcgcgtaaccaccacacccgccgcgcttaatgcgccgctacagggcgcgatggatcc

SEQ ID NO: 93 - DNA, 4443 bp, synthetic construct
  misc_feature 1..4443: note = CFTR
  source 1..4443: mol_type = other DNA
atgcagagaagccccctggagaaggcctctgtggtgagcaagctgttcttcagctggaccagacccatcctgagaaagggctacagacagagactggagctgtctgacatctaccagatcccctctgtggactctgctgacaacctgtctgagaagctggagagagagtgggacagagagctggccagcaagaagaaccccaagctgatcaatgccctgagaagatgcttcttctggagattcatgttctatggcatcttcctgtacctgggggaggtgaccaaggctgtgcagcccctgctgctgggcagaatcattgccagctatgaccctgacaacaaggaggagagaagcattgccatctacctgggcattggcctgtgcctgctgttcattgtgagaaccctgctgctgcaccctgccatctttggcctgcaccacattggcatgcagatgagaattgccatgttcagcctgatctacaagaagaccctgaagctgagcagcagagtgctggacaagatcagcattggccagctggtgagcctgctgagcaacaacctgaacaagtttgatgagggcctggccctggcccactttgtgtggattgcccccctgcaggtggccctgctgatgggcctgatctgggagctgctgcaggcctctgccttctgtggcctgggcttcctgattgtgctggccctgttccaggctggcctgggcagaatgatgatgaagtacagagaccagagagctggcaagatctctgagagactggtgatcacctctgagatgattgagaacatccagtctgtgaaggcctactgctgggaggaggccatggagaagatgattgagaacctgagacagacagagctgaagctgaccagaaaggctgcctatgtgagatacttcaacagctctgccttcttcttctctggcttctttgtggtgttcctgtctgtgctgccctatgccctgatcaagggcatcatcctgagaaagatcttcaccaccatcagcttctgcattgtgctgagaatggctgtgaccagacagttcccctgggctgtgcagacctggtatgacagcctgggggccatcaacaagatccaggacttcctgcagaagcaggagtacaagaccctggagtacaacctgaccaccacagaggtggtgatggagaatgtgacagccttctgggaggagggctttggggagctgtttgagaaggccaagcagaacaacaacaacagaaagaccagcaatggggatgacagcctgttcttcagcaacttcagcctgctgggcacccctgtgctgaaggacatcaacttcaagattgagagaggccagctgctggctgtggctggcagcacaggggctggcaagaccagcctgctgatgatgatcatgggggagctggagccctctgagggcaagatcaagcactctggcagaatcagcttctgcagccagttcagctggatcatgcctggcaccatcaaggagaacatcatctttggggtgagctatgatgagtacagatacagatctgtgatcaaggcctgccagctggaggaggacatcagcaagtttgctgagaaggacaacattgtgctgggggaggggggcatcaccctgtctgggggccagagagccagaatcagcctggccagagctgtgtacaaggatgctgacctgtacctgctggacagcccctttggctacctggatgtgctgacagagaaggagatctttgagagctgtgtgtgcaagctgatggccaacaagaccagaatcctggtgaccagcaagatggagcacctgaagaaggctgacaagatcctgatcctgcatgagggcagcagctacttctatggcaccttctctgagctgcagaacctgcagcctgacttcagcagcaagctgatgggctgtgacagctttgaccagttctctgctgagagaagaaacagcatcctgacagagaccctgcacagattcagcctggagggggatgcccctgtgagctggacagagaccaagaagcagagcttcaagcagacaggggagtttggggagaagagaaagaacagcatcctgaaccccatcaacagcatcagaaagttcagcattgtgcagaagacccccctgcagatgaatggcattgaggaggactctgatgagcccctggagagaagactgagcctggtgcctgactctgagcagggggaggccatcctgcccagaatctctgtgatcagcacaggccccaccctgcaggccagaagaagacagtctgtgctgaacctgatgacccactctgtgaaccagggccagaacatccacagaaagaccacagccagcaccagaaaggtgagcctggccccccaggccaacctgacagagctggacatctacagcagaagactgagccaggagacaggcctggagatctctgaggagatcaatgaggaggacctgaaggagtgcttctttgatgacatggagagcatccctgctgtgaccacctggaacacctacctgagatacatcacagtgcacaagagcctgatctttgtgctgatctggtgcctggtgatcttcctggctgaggtggctgccagcctggtggtgctgtggctgctgggcaacacccccctgcaggacaagggcaacagcacccacagcagaaacaacagctatgctgtgatcatcaccagcaccagcagctactatgtgttctacatctatgtgggggtggctgacaccctgctggccatgggcttcttcagaggcctgcccctggtgcacaccctgatcacagtgagcaagatcctgcaccacaagatgctgcactctgtgctgcaggcccccatgagcaccctgaacaccctgaaggctgggggcatcctgaacagattcagcaaggacattgccatcctggatgacctgctgcccctgaccatctttgacttcatccagctgctgctgattgtgattggggccattgctgtggtggctgtgctgcagccctacatctttgtggccacagtgcctgtgattgtggccttcatcatgctgagagcctacttcctgcagaccagccagcagctgaagcagctggagtctgagggcagaagccccatcttcacccacctggtgaccagcctgaagggcctgtggaccctgagagcctttggcagacagccctactttgagaccctgttccacaaggccctgaacctgcacacagccaactggttcctgtacctgagcaccctgagatggttccagatgagaattgagatgatctttgtgatcttcttcattgctgtgaccttcatcagcatcctgaccacaggggagggggagggcagagtgggcatcatcctgaccctggccatgaacatcatgagcaccctgcagtgggctgtgaacagcagcattgatgtggacagcctgatgagatctgtgagcagagtgttcaagttcattgacatgcccacagagggcaagcccaccaagagcaccaagccctacaagaatggccagctgagcaaggtgatgatcattgagaacagccatgtgaagaaggatgacatctggccctctgggggccagatgacagtgaaggacctgacagccaagtacacagaggggggcaatgccatcctggagaacatcagcttcagcatcagccctggccagagagtgggcctgctgggcagaacaggctctggcaagagcaccctgctgtctgccttcctgagactgctgaacacagagggggagatccagattgatggggtgagctgggacagcatcaccctgcagcagtggagaaaggcctttggggtgatcccccagaaggtgttcatcttctctggcaccttcagaaagaacctggacccctatgagcagtggtctgaccaggagatctggaaggtggctgatgaggtgggcctgagatctgtgattgagcagttccctggcaagctggactttgtgctggtggatgggggctgtgtgctgagccatggccacaagcagctgatgtgcctggccagatctgtgctgagcaaggccaagatcctgctgctggatgagccctctgcccacctggaccctgtgacctaccagatcatcagaagaaccctgaagcaggcctttgctgactgcacagtgatcctgtgtgagcacagaattgaggccatgctggagtgccagcagttcctggtgattgaggagaacaaggtgagacagtatgacagcatccagaagctgctgaatgagagaagcctgttcagacaggccatcagcccctctgacagagtgaagctgttcccccacagaaacagcagcaagtgcaagagcaagccccagattgctgccctgaaggaggagaccgaggaggaggtgcaggacaccagactgtaa

SEQ ID NO: 94 - protein, 1480 aa, synthetic construct
  REGION 1..1480: note = CFTR protein
MQRSPLEKASVVSKLFFSWTRPILRKGYRQRLELSDIYQIPSVDSADNLSEKLEREWDRELASKKNPKLINALRRCFFWRFMFYGIFLYLGEVTKAVQPLLLGRIIASYDPDNKEERSIAIYLGIGLCLLFIVRTLLLHPAIFGLHHIGMQMRIAMFSLIYKKTLKLSSRVLDKISIGQLVSLLSNNLNKFDEGLALAHFVWIAPLQVALLMGLIWELLQASAFCGLGFLIVLALFQAGLGRMMMKYRDQRAGKISERLVITSEMIENIQSVKAYCWEEAMEKMIENLRQTELKLTRKAAYVRYFNSSAFFFSGFFVVFLSVLPYALIKGIILRKIFTTISFCIVLRMAVTRQFPWAVQTWYDSLGAINKIQDFLQKQEYKTLEYNLTTTEVVMENVTAFWEEGFGELFEKAKQNNNNRKTSNGDDSLFFSNFSLLGTPVLKDINFKIERGQLLAVAGSTGAGKTSLLMMIMGELEPSEGKIKHSGRISFCSQFSWIMPGTIKENIIFGVSYDEYRYRSVIKACQLEEDISKFAEKDNIVLGEGGITLSGGQRARISLARAVYKDADLYLLDSPFGYLDVLTEKEIFESCVCKLMANKTRILVTSKMEHLKKADKILILHEGSSYFYGTFSELQNLQPDFSSKLMGCDSFDQFSAERRNSILTETLHRFSLEGDAPVSWTETKKQSFKQTGEFGEKRKNSILNPINSIRKFSIVQKTPLQMNGIEEDSDEPLERRLSLVPDSEQGEAILPRISVISTGPTLQARRRQSVLNLMTHSVNQGQNIHRKTTASTRKVSLAPQANLTELDIYSRRLSQETGLEISEEINEEDLKECFFDDMESIPAVTTWNTYLRYITVHKSLIFVLIWCLVIFLAEVAASLVVLWLLGNTPLQDKGNSTHSRNNSYAVIITSTSSYYVFYIYVGVADTLLAMGFFRGLPLVHTLITVSKILHHKMLHSVLQAPMSTLNTLKAGGILNRFSKDIAILDDLLPLTIFDFIQLLLIVIGAIAVVAVLQPYIFVATVPVIVAFIMLRAYFLQTSQQLKQLESEGRSPIFTHLVTSLKGLWTLRAFGRQPYFETLFHKALNLHTANWFLYLSTLRWFQMRIEMIFVIFFIAVTFISILTTGEGEGRVGIILTLAMNIMSTLQWAVNSSIDVDSLMRSVSRVFKFIDMPTEGKPTKSTKPYKNGQLSKVMIIENSHVKKDDIWPSGGQMTVKDLTAKYTEGGNAILENISFSISPGQRVGLLGRTGSGKSTLLSAFLRLLNTEGEIQIDGVSWDSITLQQWRKAFGVIPQKVFIFSGTFRKNLDPYEQWSDQEIWKVADEVGLRSVIEQFPGKLDFVLVDGGCVLSHGHKQLMCLARSVLSKAKILLLDEPSAHLDPVTYQIIRRTLKQAFADCTVILCEHRIEAMLECQQFLVIEENKVRQYDSIQKLLNERSLFRQAISPSDRVKLFPHRNSSKCKSKPQIAALKEETEEEVQDTRL

SEQ ID NO: 95 - protein, 1428 aa, synthetic construct
  REGION 1..1428: note = CFTRdeltaR protein
MQRSPLEKASVVSKLFFSWTRPILRKGYRQRLELSDIYQIPSVDSADNLSEKLEREWDRELASKKNPKLINALRRCFFWRFMFYGIFLYLGEVTKAVQPLLLGRIIASYDPDNKEERSIAIYLGIGLCLLFIVRTLLLHPAIFGLHHIGMQMRIAMFSLIYKKTLKLSSRVLDKISIGQLVSLLSNNLNKFDEGLALAHFVWIAPLQVALLMGLIWELLQASAFCGLGFLIVLALFQAGLGRMMMKYRDQRAGKISERLVITSEMIENIQSVKAYCWEEAMEKMIENLRQTELKLTRKAAYVRYFNSSAFFFSGFFVVFLSVLPYALIKGIILRKIFTTISFCIVLRMAVTRQFPWAVQTWYDSLGAINKIQDFLQKQEYKTLEYNLTTTEVVMENVTAFWEEGFGELFEKAKQNNNNRKTSNGDDSLFFSNFSLLGTPVLKDINFKIERGQLLAVAGSTGAGKTSLLMMIMGELEPSEGKIKHSGRISFCSQFSWIMPGTIKENIIFGVSYDEYRYRSVIKACQLEEDISKFAEKDNIVLGEGGITLSGGQRARISLARAVYKDADLYLLDSPFGYLDVLTEKEIFESCVCKLMANKTRILVTSKMEHLKKADKILILHEGSSYFYGTFSELQNLQPDFSSKLMGCDSFDQFSAERRNSILTETLHRFSLEGDAPVSWTETKKQSFKQTGEFGEKRKNSILNPINSTLQARRRQSVLNLMTHSVNQGQNIHRKTTASTRKVSLAPQANLTELDIYSRRLSQETGLEISEEINEEDLKECFFDDMESIPAVTTWNTYLRYITVHKSLIFVLIWCLVIFLAEVAASLVVLWLLGNTPLQDKGNSTHSRNNSYAVIITSTSSYYVFYIYVGVADTLLAMGFFRGLPLVHTLITVSKILHHKMLHSVLQAPMSTLNTLKAGGILNRFSKDIAILDDLLPLTIFDFIQLLLIVIGAIAVVAVLQPYIFVATVPVIVAFIMLRAYFLQTSQQLKQLESEGRSPIFTHLVTSLKGLWTLRAFGRQPYFETLFHKALNLHTANWFLYLSTLRWFQMRIEMIFVIFFIAVTFISILTTGEGEGRVGIILTLAMNIMSTLQWAVNSSIDVDSLMRSVSRVFKFIDMPTEGKPTKSTKPYKNGQLSKVMIIENSHVKKDDIWPSGGQMTVKDLTAKYTEGGNAILENISFSISPGQRVGLLGRTGSGKSTLLSAFLRLLNTEGEIQIDGVSWDSITLQQWRKAFGVIPQKVFIFSGTFRKNLDPYEQWSDQEIWKVADEVGLRSVIEQFPGKLDFVLVDGGCVLSHGHKQLMCLARSVLSKAKILLLDEPSAHLDPVTYQIIRRTLKQAFADCTVILCEHRIEAMLECQQFLVIEENKVRQYDSIQKLLNERSLFRQAISPSDRVKLFPHRNSSKCKSKPQIAALKEETEEEVQDTRL

SEQ ID NO: 96 - DNA, 250 bp, synthetic construct
  misc_feature 1..250: note = Mouse U1a promoter sequence
  source 1..250: mol_type = other DNA
atggaggcggtactatgtagatgagaattcaggagcaaactgggaaaagcaactgcttccaaatatttgtgatttttacagtgtagttttggaaaaactcttagcctaccaattcttctaagtgttttaaaatgtgggagccagtacacatgaagttatagagtgttttaatgaggcttaaatatttaccgtaactatgaaatgctacgcatatcatgctgttcaggctccgtggccacgcaactcatac

SEQ ID NO: 97 - DNA, 101 bp, synthetic construct
  misc_feature 1..101: note = Polymerase III H1 mutant promoter sequence
  source 1..101: mol_type = other DNA
aatatttgcatgtcgctatgtgttctgggaaatcaccataaacgtgaaatgtctttggatttgggaatcttcgaagttctgtatgagaccacagatctcca

SEQ ID NO: 98 - DNA, 2214 bp, synthetic construct
  misc_feature 1..2214: note = AAV110 DNA
  source 1..2214: mol_type = other DNA
atggctgccgatggttatcttccagattggctcgaggacaacctctctgagggcattcgcgagtggtgggacttgaaacctggagccccgaaacccaaagccaaccagcaaaagcaggacgacggccggggtctggtgcttcctggctacaagtacctcggacccttcaacggactcgacaagggggagcccgtcaacgcggcggatgcagcggccctcgagcacgacaaggcctacgaccagcagctcaaagcgggtgacaatccgtacctgcggtataaccacgccgacgccgagtttcaggagcgtctgcaagaagatacgtcttttgggggcaacctcgggcgagcagtcttccaggccaagaagcgggttctcgaacctctcggtctggttgaggaaggcgctaagacggctcctggaaagaagagaccggtagagccatcaccccagcgttctccagactcctctacgggcatcggcaagaaaggccaacagcccgccagaaaaagactcaattttggtcagactggcgactcagagtcagtccccgacccacaacctctcggagaacctccagcaacccccgctgctgtgggacctactacaatggcttcaggcggtggcgcaccaatggcagacaataacgaaggcgccgacggagtgggtaatgcctcaggaaattggcattgcgattccacatggctgggcgacagagtcatcaccaccagcacccgaacatgggccttgcccacctataacaaccacctctacaagcaaatctccagtgcttcaacgggggccagcaacgacaaccactacttcggctacagcaccccctgggggtattttgatttcaacagattccactgccatttctcaccacgtgactggcagcgactcatcaacaacaattggggattccggcccaagagactcaacttcaagctcttcaacatccaagtcaaggaggtcacgacgaatgatggcgtcacgaccatcgctaataaccttaccagcacggttcaagtcttctcggactcggagtaccagttgccgtacgtcctcggctctgcgcaccagggctgcctccctccgttcccggcggacgtgttcatgattccgcagtacggctacctaacgctcaacaatggcagccaggcagtgggacggtcatccttttactgcctggaatatttcccatcgcagatgctgagaacgggcaataactttaccttcagctacaccttcgaggacgtgcctttccacagcagctacgcgcacagccagagcctggaccggctgatgaatcctctcatcgaccagtacctgtattacctgaacagaactcagaatcagtccggaagtgcccaaaacaaggacttgctgtttagccgggggtctccagctggcatgtctgttcagcccaaaaactggctacctggaccctgttaccggcagcagcgcgtttctaaaacaaaaacagacaacaacaacagcaactttacctggactggtgcttcaaaatataaccttaatgggcgtgaatctataatcaaccctggcactgctatggcctcacacaaagacgacaaagacaagttctttcccatgagcggtgtcatgatttttggaaaggagagcgccggagcttcaaacactgcattggacaatgtcatgatcacagacgaagaggaaatcaaagccactaaccccgtggccaccgaaagatttgggactgtggcagtcaatctccagagcagcagcacagaccctgcgaccggagatgtgcatgttatgggagccttacctggaatggtgtggcaagacagagacgtatacctgcagggtcctatttgggccaaaattcctcacacggatggacactttcacccgtctcctctcatgggcggctttggacttaagcacccgcctcctcagatcctcatcaaaaacacgcctgttcctgcgaatcctccggcagagttttcggctacaaagtttgcttcattcatcacccagtattccacaggacaagtgagcgtggagattgaatgggagctgcagaaagaaaacagcaaacgctggaatcccgaagtgcagtatacatctaactatgcaaaatctgccaacgttgatttcactgtggacaacaatggactttatactgagcctcgccccattggcacccgttacctcacccgtcccctgtaa

SEQ ID NO: 99 - DNA, 1509 bp, Homo sapiens
  misc_feature 1..1509: note = Sulfoglucosamine sulfohydrolase (SGSH)
  source 1..1509: mol_type = genomic DNA
atgagctgccccgtgcccgcctgctgcgcgctgctgctagtcctggggctctgccgggcgcgtccccggaacgcactgctgctcctcgcggatgacggaggctttgagagtggcgcgtacaacaacagcgccatcgccaccccgcacctggacgccttggcccgccgcagcctcctctttcgcaatgccttcacctcggtcagcagctgctctcccagccgcgccagcctcctcactggcctgccccagcatcagaatgggatgtacgggctgcaccaggacgtgcaccacttcaactccttcgacaaggtgcggagcctgccgctgctgctcagccaagctggtgtgcgcacaggcatcatcgggaagaagcacgtggggccggagaccgtgtacccgtttgactttgcgtacacggaggagaatggctccgtcctccaggtggggcggaacatcactagaattaagctgctcgtccggaaattcctgcagactcaggatgaccagcctttcttcctctacgtcgccttccacgacccccaccgctgtgggcactcccagccccagtacggaaccttctgtgagaagtttggcaacggagagagcggcatgggtcgtatcccagactggaccccccaggcctacgacccactggacgtgctggtgccttacttcgtccccaacaccccggcagcccgagccgacctggccgctcagtacaccaccgtcggccgcatggaccaaggagttggactggtgctccaggagctgcgtgacgccggtgtcctgaacgacacactggtgatcttcacgtccgacaacgggatccccttccccagcggcaggaccaacctgtactggccgggcactgctgaacccttactggtgtcatccccggagcacccaaaacgctggggccaagtcagcgaggcctacgtgagcctcctagacctcacgcccaccatcttggattggttctcgatcccgtaccccagctacgccatctttggctcgaagaccatccacctcactggccggtccctcctgccggcgctggaggccgagcccctctgggccaccgtctttggcagccagagccaccacgaggtcaccatgtcctaccccatgcgctccgtgcagcaccggcacttccgcctcgtgcacaacctcaacttcaagatgccctttcccatcgaccaggacttctacgtctcacccaccttccaggacctcctgaaccgcaccacagctggtcagcccacgggctggtacaaggacctccgtcattactactaccgggcgcgctgggagctctacgaccggagccgggacccccacgagacccagaacctggccaccgacccgcgctttgctcagcttctggagatgcttcgggaccagctggccaagtggcagtgggagacccacgacccctgggtgtgcgcccccgacggcgtcctggaggagaagctctctccccagtgccagcccctccacaatgagctgtga

SEQ ID NO: 100 - DNA, 1509 bp, synthetic construct
  misc_feature 1..1509: note = Codon optimized CO1-SGSH
  source 1..1509: mol_type = other DNA
atgagctgtcctgttccagcctgttgtgccctgctgctggttctgggactgtgcagagccagacctaggaacgctctgctgctgctcgctgacgatggcggatttgagagcggcgcctacaacaacagcgccattgccacacctcacctggatgccctggccagaagaagcctgctgttcagaaacgccttcaccagcgtgtccagctgcagcccttctagagctagcctgctgacaggactgccccagcaccagaatgggatgtatggcctgcaccaggacgtgcaccacttcaacagcttcgacaaagtgcggagcctgcctctgcttctgtctcaagccggcgtcagaacaggcatcatcggcaagaaacacgtgggccccgagacagtgtaccccttcgatttcgcctacaccgaagagaacggcagcgtgctgcaagtgggcagaaacatcacccggatcaagctgctcgtgcggaagttcctgcagacccaggacgaccagcctttcttcctgtacgtggccttccacgatcctcacagatgcggccatagccagcctcagtacggcaccttctgcgagaagtttggcaacggcgagagcggcatgggcagaatccctgattggacccctcaggcctacgatcccctggatgtgctggtgccttacttcgtgcctaacacaccagccgccagagccgatctggccgctcagtatacaaccgtgggaagaatggaccaaggcgtcggcctggttctgcaagagcttagagatgccggcgtgctgaacgacaccctggtcatctttaccagcgacaacggcatcccctttccatctggccggaccaatctgtactggcctggaacagctgagcccctgctggtgtctagccctgagcaccctaagagatggggccaagtgtctgaggcctacgtgtccctgctggatctgacccctaccatcctggactggttcagcatcccctatcctagctacgccatcttcggcagcaagaccatccacctgaccggcagatctctgctgccagctctggaagctgaacctctgtgggccacagtgtttggcagccagtctcaccacgaagtgacaatgagctaccccatgcggagcgtgcagcacagacacttcagactggtgcacaacctgaacttcaagatgccctttccaatcgaccaggacttctatgtgtccccaaccttccaggacctgctgaacagaaccacagccggccaacctaccggctggtacaaggacctgcggcactactactatagagccagatgggagctgtacgaccggtccagagatccccacgagacacagaacctggccaccgatcctagattcgcccagctgctggaaatgctgagagatcagctggccaagtggcagtgggagacacacgatccttgggtctgcgctcctgatggcgtgctggaagagaagctgtcccctcagtgtcagcccctgcacaacgagctttaa

SEQ ID NO: 101 - DNA, 1596 bp, synthetic construct
  misc_feature 1..1596: note = Codon optimized + GET CO1-SGSH-GET
  source 1..1596: mol_type = other DNA
atgagctgtcctgttccagcctgttgtgccctgctgctggttctgggactgtgcagagccagacctaggaacgctctgctgctgctcgctgacgatggcggatttgagagcggcgcctacaacaacagcgccattgccacacctcacctggatgccctggccagaagaagcctgctgttcagaaacgccttcaccagcgtgtccagctgcagcccttctagagctagcctgctgacaggactgccccagcaccagaatgggatgtatggcctgcaccaggacgtgcaccacttcaacagcttcgacaaagtgcggagcctgcctctgcttctgtctcaagccggcgtcagaacaggcatcatcggcaagaaacacgtgggccccgagacagtgtaccccttcgatttcgcctacaccgaagagaacggcagcgtgctgcaagtgggcagaaacatcacccggatcaagctgctcgtgcggaagttcctgcagacccaggacgaccagcctttcttcctgtacgtggccttccacgatcctcacagatgcggccatagccagcctcagtacggcaccttctgcgagaagtttggcaacggcgagagcggcatgggcagaatccctgattggacccctcaggcctacgatcccctggatgtgctggtgccttacttcgtgcctaacacaccagccgccagagccgatctggccgctcagtatacaaccgtgggaagaatggaccaaggcgtcggcctggttctgcaagagcttagagatgccggcgtgctgaacgacaccctggtcatctttaccagcgacaacggcatcccctttccatctggccggaccaatctgtactggcctggaacagctgagcccctgctggtgtctagccctgagcaccctaagagatggggccaagtgtctgaggcctacgtgtccctgctggatctgacccctaccatcctggactggttcagcatcccctatcctagctacgccatcttcggcagcaagaccatccacctgaccggcagatctctgctgccagctctggaagctgaacctctgtgggccacagtgtttggcagccagtctcaccacgaagtgacaatgagctaccccatgcggagcgtgcagcacagacacttcagactggtgcacaacctgaacttcaagatgccctttccaatcgaccaggacttctatgtgtccccaaccttccaggacctgctgaacagaaccacagccggccaacctaccggctggtacaaggacctgcggcactactactatagagccagatgggagctgtacgaccggtccagagatccccacgagacacagaacctggccaccgatcctagattcgcccagctgctggaaatgctgagagatcagctggccaagtggcagtgggagacacacgatccttgggtctgcgctcctgatggcgtgctggaagagaagctgtcccctcagtgtcagcccctgcacaacgagctgcggcgtcgtcggcgaagaagaagaaagcgcaagaaaaaaggcaaaggcctgggcaagaagcgggacccctgtctgagaaagtacaaataa

SEQ ID NO: 102 - DNA, 1509 bp, synthetic construct
  misc_feature 1..1509: note = Codon optimized CO2-SGSH
  source 1..1509: mol_type = other DNA
atgagctgccctgtgcctgcctgctgtgccctgctgctggtgctgggcctgtgcagagccagacctaggaatgccctgctgctgctggctgatgatgggggctttgagagtggggcctacaacaacagtgccattgccaccccccacctggatgccctggccagaagaagcctgctgttcagaaatgccttcaccagtgtgagcagctgcagccccagcagagccagcctgctgacaggcctgccccagcaccagaatggcatgtatggcctgcaccaggatgtgcaccacttcaacagctttgacaaggtgagaagcctgcccctgctgctgagccaggctggggtgagaacaggcatcattggcaagaagcatgtgggccctgagacagtgtacccctttgactttgcctacacagaggagaatggcagtgtgctgcaggtgggcagaaacatcaccagaatcaagctgctggtgagaaagttcctgcagacccaggatgaccagcccttcttcctgtatgtggccttccatgacccccacagatgtggccacagccagccccagtatggcaccttctgtgagaagtttggcaatggggagagtggcatgggcagaatccctgactggaccccccaggcctatgaccccctggatgtgctggtgccctactttgtgcccaacacccctgctgccagagctgacctggctgcccagtacaccacagtgggcagaatggaccagggggtgggcctggtgctgcaggagctgagagatgctggggtgctgaatgacaccctggtgatcttcaccagtgacaatggcatccccttccccagtggcagaaccaacctgtactggcctggcacagctgagcccctgctggtgagcagccctgagcaccccaagagatggggccaggtgagtgaggcctatgtgagcctgctggacctgacccccaccatcctggactggttcagcatcccctaccccagctatgccatctttggcagcaagaccatccacctgacaggcagaagcctgctgcctgccctggaggctgagcccctgtgggccacagtgtttggcagccagagccaccatgaggtgaccatgagctaccccatgagaagtgtgcagcacagacacttcagactggtgcacaacctgaacttcaagatgcccttccccattgaccaggacttctatgtgagccccaccttccaggacctgctgaacagaaccacagctggccagcccacaggctggtacaaggacctgagacactactactacagagccagatgggagctgtatgacagaagcagagacccccatgagacccagaacctggccacagaccccagatttgcccagctgctggagatgctgagagaccagctggccaagtggcagtgggagacccatgacccctgggtgtgtgcccctgatggggtgctggaggagaagctgagcccccagtgccagcccctgcacaatgagctgtga

SEQ ID NO: 103 - DNA, 921 bp, synthetic construct
  misc_feature 1..921: note = Codon optimized Ceroid Lipofuscinosis, Neuronal, 1 (CLN1)
  source 1..921: mol_type = other DNA
atggcttctccggggtgtctgtggctgctggcagtggcactccttccctggacttgcgccagccgggctctgcagcacctcgaccctccagcccctcttccactggtgatttggcacggaatgggtgattcctgctgtaatcccctgtcaatgggagccatcaagaagatggtggagaagaagatccctggaatctacgtgctgtcactggagattggaaagaccctgatggaggacgtcgagaactccttcttcctcaatgtcaactctcaagtgaccaccgtctgccaggccctggccaaggacccgaagctgcagcaggggtataatgctatggggttcagccagggaggacagttccttcgggctgtggcccaacgctgccctagcccacccatgatcaacctgatctcagtgggtggccagcatcagggcgtgttcggacttccccggtgtcccggggaatcctctcatatctgcgacttcatccgcaaaactctcaatgcaggcgcttattcaaaggtcgtccaagagaggctggtgcaagccgagtactggcacgatcccattaaggaggacgtgtacagaaatcactcaatctttctggccgacattaaccaggagaggggaattaacgaatcatataagaagaatctcatggccctcaaaaagttcgtcatggtgaagttccttaacgatagcattgtggacccagtggacagcgaatggttcggattttaccgctcaggccaggcaaaagaaaccatccctctccaagagacttctctttacacccaagacagacttgggcttaaggaaatggataacgctggtcagctggtgttcctcgccaccgaaggtgaccatctgcagctcagcgaagagtggttctacgctcatatcatcccgtttcttggttga

SEQ ID NO: 104 - DNA, 885 bp, Homo sapiens
  misc_feature 1..885: note = Survival Motor Neuron 1 (SMN1)
  source 1..885: mol_type = genomic DNA
atggcgatgagcagcggcggcagtggtggcggcgtcccggagcaggaggattccgtgctgttccggcgcggcacaggccagagcgatgattctgacatttgggatgatacagcactgataaaagcatatgataaagctgtggcttcatttaagcatgctctaaagaatggtgacatttgtgaaacttcgggtaaaccaaaaaccacacctaaaagaaaacctgctaagaagaataaaagccaaaagaagaatactgcagcttccttacaacagtggaaagttggggacaaatgttctgccatttggtcagaagacggttgcatttacccagctaccattgcttcaattgattttaagagagaaacctgtgttgtggtttacactggatatggaaatagagaggagcaaaatctgtccgatctactttccccaatctgtgaagtagctaataatatagaacagaatgctcaagagaatgaaaatgaaagccaagtttcaacagatgaaagtgagaactccaggtctcctggaaataaatcagataacatcaagcccaaatctgctccatggaactcttttctccctccaccaccccccatgccagggccaagactgggaccaggaaagccaggtctaaaattcaatggcccaccaccgccaccgccaccaccaccaccccacttactatcatgctggctgcctccatttccttctggaccaccaataattcccccaccacctcccatatgtccagattctcttgatgatgctgatgctttgggaagtatgttaatttcatggtacatgagtggctatcatactggctattatatgggttttagacaaaatcaaaaagaaggaaggtgctcacattccttaaattaa

SEQ ID NO: 105 - DNA, 885 bp, synthetic construct
  misc_feature 1..885: note = Codon optimized CO1-SMN1
  source 1..885: mol_type = other DNA
atggcgatgtctagtggtggatctggtggcggcgtgcccgagcaagaagatagcgtcctgttcagaagaggcaccggccagagcgacgacagcgacatctgggatgatacagccctgatcaaggcctacgacaaggccgtggccagctttaagcacgccctgaagaacggcgatatctgcgagacaagcggcaagcccaagaccacacctaagagaaagcccgccaagaagaacaagagccagaagaagaataccgccgccagcctgcagcagtggaaagtgggcgataagtgcagcgccatttggagcgaggacggctgtatctaccctgccacaatcgccagcatcgacttcaagcgggaaacctgcgtggtggtgtacacaggctacggcaacagagaggaacagaacctgagcgacctgctgtccccaatttgcgaggtggccaacaacatcgagcagaacgcccaagagaacgagaacgagtcccaggtgtccaccgacgagagcgagaatagcagaagccccggcaacaagagcgacaacatcaagcctaagagcgccccttggaacagcttcctgcctcctcctccaccaatgcctggacctagactcggacctggaaagcccggcctgaagttcaatggacctccaccaccgccaccacctccgcctccacatcttctgtcttgttggctgcctccatttcctagcggccctccaatcatcccgccacctccacctatctgccccgacagtctggatgatgctgatgccctgggctccatgctgatctcttggtacatgagcggctaccacaccggctactacatgggcttcagacagaaccagaaagagggccgttgcagccacagcctgaactga

SEQ ID NO: 106 - DNA, 885 bp, synthetic construct
  misc_feature 1..885: note = Codon optimized CO2-SMN1
  source 1..885: mol_type = other DNA
atggccatgagcagtgggggcagtggaggaggggtgcctgagcaggaggacagtgtgctgttcagaagaggcacaggccagagtgatgacagtgacatctgggatgacacagccctgatcaaggcctatgacaaggctgtggccagcttcaagcatgccctgaagaatggggacatctgtgagaccagtggcaagcccaagaccacccccaagagaaagcctgccaagaagaacaagagccagaagaagaacacagctgccagcctgcagcagtggaaggtgggagacaagtgcagtgccatctggagtgaggatggctgcatctaccctgccaccattgccagcattgacttcaagagagagacctgtgtggtggtgtacacaggctatggcaacagagaggagcagaacctgagtgacctgctgagccccatctgtgaggtggccaacaacattgagcagaatgcccaggagaatgagaatgagagccaggtgagcacagatgagagtgagaacagcagaagccctggcaacaagagtgacaacatcaagcccaagagtgccccttggaacagcttcctgccacccccaccacccatgcctggccccagactgggccctggcaagcctggcctgaagttcaatggcccaccaccccctcctccaccaccccctccccacctgctgagctgctggctgccccccttccccagtggcccacccatcatcccacctcccccacccatctgccctgacagcctggatgatgctgatgccctgggcagcatgctgatcagctggtacatgagtggctaccacacaggctactacatgggcttcagacagaaccagaaggagggcagatgcagccacagcctgaactga

SEQ ID NO: 107 - DNA, 1548 bp, Homo sapiens
  misc_feature 1..1548: note = Tissue Non-specific Alkaline Phosphatase (TNALP)
  source 1..1548: mol_type = genomic DNA
atgatttcaccattcttagtactggccattggcacctgccttactaactcactagtgccagagaaagagaaagaccccaagtactggcgagaccaagcgcaagagacactgaaatatgccctggagcttcagaagctcaacaccaacgtggctaagaatgtcatcatgttcctgggagatgggatgggtgtctccacagtgacggctgcccgcatcctcaagggtcagctccaccacaaccctggggaggagaccaggctggagatggacaagttccccttcgtggccctctccaagacgtacaacaccaatgcccaggtccctgacagcgccggcaccgccaccgcctacctgtgtggggtgaaggccaatgagggcaccgtgggggtaagcgcagccactgagcgttcccggtgcaacaccacccaggggaacgaggtcacctccatcctgcgctgggccaaggacgctgggaaatctgtgggcattgtgaccaccacgagagtgaaccatgccacccccagcgccgcctacgcccactcggctgaccgggactggtactcagacaacgagatgccccctgaggccttgagccagggctgtaaggacatcgcctaccagctcatgcataacatcagggacattgacgtgatcatggggggtggccggaaatacatgtaccccaagaataaaactgatgtggagtatgagagtgacgagaaagccaggggcacgaggctggacggcctggacctcgttgacacctggaagagcttcaaaccgagatacaagcactcccacttcatctggaaccgcacggaactcctgacccttgacccccacaatgtggactacctattgggtctcttcgagccaggggacatgcagtacgagctgaacaggaacaacgtgacggacccgtcactctccgagatggtggtggtggccatccagatcctgcggaagaaccccaaaggcttcttcttgctggtggaaggaggcagaattgaccacgggcaccatgaaggaaaagccaagcaggccctgcatgaggcggtggagatggaccgggccatcgggcaggcaggcagcttgacctcctcggaagacactctgaccgtggtcactgcggaccattcccacgtcttcacatttggtggatacaccccccgtggcaactctatctttggtctggcccccatgctgagtgacacagacaagaagcccttcactgccatcctgtatggcaatgggcctggctacaaggtggtgggcggtgaacgagagaatgtctccatggtggactatgctcacaacaactaccaggcgcagtctgctgtgcccctgcgccacgagacccacggcggggaggacgtggccgtcttctccaagggccccatggcgcacctgctgcacggcgtccacgagcagaactacgtcccccacgtgatggcgtatgcagcctgcatcggggccaacctcggccactgtgctcctgccagctcggcaggatccgatgatgacgacgacgatgacgatgatgattga

SEQ ID NO: 108 - DNA, 1548 bp, synthetic construct
  misc_feature 1..1548: note = Codon optimized, CO1-TNALP contains D10 tag at C end
  source 1..1548: mol_type = other DNA
atgatctctccatttctggtgctggccatcggcacctgtctgaccaactcactagtgcccgagaaagagaaggaccccaagtactggcgcgatcaggcccaagagacactgaagtacgccctggaactgcagaaactgaacaccaacgtggccaagaacgtgatcatgttcctcggcgacggcatgggcgtgtccacagttacagccgccagaatcctgaagggccagctgcaccataatcctggcgaagagacacggctggaaatggacaagttcccattcgtggccctgagcaagacctacaacaccaatgctcaggtgcccgattctgccggaacagccacagcttatctgtgcggcgtgaaggccaatgagggcaccgttggagtgtctgccgccaccgaaagatcccggtgcaataccacacagggcaacgaagtgaccagcatcctgagatgggccaaagacgccggcaagtctgtgggcatcgtgaccaccaccagagtgaaccacgccacacctagcgccgcctatgctcactctgccgacagagactggtacagcgacaacgagatgcctcctgaggctctgtctcagggctgcaaggatatcgcctaccagctgatgcacaacatccgggacattgatgtgatcatgggcggaggccggaagtacatgtatcccaagaacaagaccgacgtcgagtacgagagcgacgagaaggccagaggcacaagactggatggcctggacctggtggatacctggaagtccttcaagccccggtacaagcacagccacttcatctggaaccggaccgagctgctgacactggaccctcacaatgtggactacctgctgggcctgttcgagcccggcgatatgcagtacgagctgaaccggaacaacgtgacagaccccagcctgagcgagatggtggttgtggccattcagatcctgcggaagaaccccaagggattcttcctgctggtggaaggcggcaggatcgatcacggacaccatgagggaaaagccaagcaggccctgcacgaggccgtcgaaatggatagagccattggccaggccggcagcctgacaagctctgaggatacactgaccgtggtcaccgccgatcacagccacgtgttcacattcggcggctacacccctagaggcaacagcatctttggactggcccctatgctgagcgacaccgacaagaagcctttcaccgccatcctgtacggcaacggccctggctataaggttgtcggaggcgagagggaaaacgtgtccatggtggattacgcccacaacaactaccaggctcagagcgccgtgcctctgagacacgaaacacacggcggagaagatgtggccgtgttcagcaagggccccatggctcatctgctgcatggcgtgcacgagcagaattacgtgccacacgtgatggcctacgccgcctgtattggagccaatctgggacattgtgcccctgccagtagcgccggatccgacgatgatgacgacgacgatgacgatgactga

SEQ ID NO: 109 - DNA, 1548 bp, synthetic construct
  misc_feature 1..1548: note = Codon optimized, CO2-TNALP contains D10 tag at C end
  source 1..1548: mol_type = other DNA
atgatcagccccttcctggtgctggccattggcacctgcctgaccaacagcctggtgcctgagaaggagaaggaccccaagtactggagagaccaggcccaggagaccctgaagtatgccctggagctgcagaagctgaacaccaatgtggccaagaatgtgatcatgttcctgggggatggcatgggggtgagcacagtgacagctgccagaatcctgaagggccagctgcaccacaaccctggggaggagaccagactggagatggacaagttcccctttgtggccctgagcaagacctacaacaccaatgcccaggtgcctgacagtgctggcacagccacagcctacctgtgtggggtgaaggccaatgagggcacagtgggggtgagtgctgccacagagagaagcagatgcaacaccacccagggcaatgaggtgaccagcatcctgagatgggccaaggatgctggcaagagtgtgggcattgtgaccaccaccagagtgaaccatgccacccccagtgctgcctatgcccacagtgctgacagagactggtacagtgacaatgagatgccccctgaggccctgagccagggctgcaaggacattgcctaccagctgatgcacaacatcagagacattgatgtgatcatgggggggggcagaaagtacatgtaccccaagaacaagacagatgtggagtatgagagtgatgagaaggccagaggcaccagactggatggcctggacctggtggacacctggaagagcttcaagcccagatacaagcacagccacttcatctggaacagaacagagctgctgaccctggacccccacaatgtggactacctgctgggcctgtttgagcctggggacatgcagtatgagctgaacagaaacaatgtgacagaccccagcctgagtgagatggtggtggtggccatccagatcctgagaaagaaccccaagggcttcttcctgctggtggaggggggcagaattgaccatggccaccatgagggcaaggccaagcaggccctgcatgaggctgtggagatggacagagccattggccaggctggcagcctgaccagcagtgaggacaccctgacagtggtgacagctgaccacagccatgtgttcacctttgggggctacacccccagaggcaacagcatctttggcctggcccccatgctgagtgacacagacaagaagcccttcacagccatcctgtatggcaatggccctggctacaaggtggtggggggggagagagagaatgtgagcatggtggactatgcccacaacaactaccaggcccagagtgctgtgcccctgagacatgagacccatgggggggaggatgtggctgtgttcagcaagggccccatggcccacctgctgcatggggtgcatgagcagaactatgtgccccatgtgatggcctatgctgcctgcattggggccaacctgggccactgtgcccctgccagcagtgctggatccgatgatgatgatgatgatgatgatgatgactga

SEQ ID NO: 110 - DNA, 636 bp, Homo sapiens
  misc_feature 1..636: note = Glial Cell Derived Neurotrophic Factor (GDNF)
  source 1..636: mol_type = genomic DNA
atgaagttatgggatgtcgtggctgtctgcctggtgctgctccacaccgcgtccgccttcccgctgcccgccggcaagaggcctcccgaggcgcccgccgaagaccgctccctcggccgccgccgcgcgcccttcgcgctgagcagtgactcaaatatgccagaggattatcctgatcagttcgatgatgtcatggattttattcaagccaccattaaaagactgaaaaggtcaccagataaacaaatggcagtgcttcctagaagagagcggaatcggcaggctgcagctgccaacccagagaattccagaggaaaaggtcggagaggccagaggggcaaaaaccggggttgtgtcttaactgcaatacatttaaatgtcactgacttgggtctgggctatgaaaccaaggaggaactgatttttaggtactgcagcggctcttgcgatgcagctgagacaacgtacgacaaaatattgaaaaacttatccagaaatagaaggctggtgagtgacaaagtagggcaggcatgttgcagacccatcgcctttgatgatgacctgtcgtttttagatgataacctggtttaccatattctaagaaagcattccgctaaaaggtgtggatgtatctaa

SEQ ID NO: 111 - DNA, 1611 bp, Homo sapiens
  misc_feature 1..1611: note = Tissue Glucosyl Ceramidase beta (GBA1)
  source 1..1611: mol_type = genomic DNA
atggagttttcaagtccttccagagaggaatgtcccaagcctttgagtagggtaagcatcatggctggcagcctcacaggattgcttctacttcaggcagtgtcgtgggcatcaggtgcccgcccctgcatccctaaaagcttcggctacagctcggtggtgtgtgtctgcaatgccacatactgtgactcctttgaccccccgacctttcctgcccttggtaccttcagccgctatgagagtacacgcagtgggcgacggatggagctgagtatggggcccatccaggctaatcacacgggcacaggcctgctactgaccctgcagccagaacagaagttccagaaagtgaagggatttggaggggccatgacagatgctgctgctctcaacatccttgccctgtcaccccctgcccaaaatttgctacttaaatcgtacttctctgaagaaggaatcggatataacatcatccgggtaccaatggccagctgtgacttctccatccgcacctacacctatgcagacacccctgatgatttccagttgcacaacttcagcctcccagaggaagataccaagctcaagatacccctgattcaccgagccctgcagttggcccagcgtcccgtttcactccttgccagcccctggacatcacccacttggctcaagaccaatggagcggtgaatgggaaggggtcactcaagggacagcccggagacatctaccaccagacctgggccagatactttgtgaagttcctggatgcctatgctgagcacaagttacagttctgggcagtgacagctgaaaatgagccttctgctgggctgttgagtggataccccttccagtgcctgggcttcacccctgaacatcagcgagacttcattgcccgtgacctaggtcctaccctcgccaacagtactcaccacaatgtccgcctactcatgctggatgaccaacgcttgctgctgccccactgggcaaaggtggtactgacagacccagaagcagctaaatatgttcatggcattgctgtacattggtacctggactttctggctccagccaaagccaccctaggggagacacaccgcctgttccccaacaccatgctctttgcctcagaggcctgtgtgggctccaagttctgggagcagagtgtgcggctaggctcctgggatcgagggatgcagtacagccacagcatcatcacgaacctcctgtaccatgtggtcggctggaccgactggaaccttgccctgaaccccgaaggaggacccaattgggtgcgtaactttgtcgacagtcccatcattgtagacatcaccaaggacacgttttacaaacagcccatgttctaccaccttggccacttcagcaagttcattcctgagggctcccagagagtggggctggttgccagtcagaagaacgacctggacgcagtggcactgatgcatcccgatggctctgctgttgtggtcgtgctaaaccgctcctctaaggatgtgcctcttaccatcaaggatcctgctgtgggcttcctggagacaatctcacctggctactccattcacacctacctgtggcgtcgccagtga

SEQ ID NO: 112 - DNA, 1611 bp, synthetic construct
  misc_feature 1..1611: note = Codon optimized CO1-GBA1
  source 1..1611: mol_type = other DNA
atggagttcagcagccccagcagagaggagtgccccaagcccctgagcagagtgagcatcatggctggcagcctgacaggcctgctgctgctgcaggctgtgagctgggccagtggggccagaccctgcatccccaagagctttggctacagcagtgtggtgtgtgtgtgcaatgccacctactgtgacagctttgacccccccaccttccctgccctgggcaccttcagcagatatgagagcaccagaagtggcagaagaatggagctgagcatgggccccatccaggccaaccacacaggcacaggcctgctgctgaccctgcagcctgagcagaagttccagaaggtgaagggctttgggggggccatgacagatgctgctgccctgaacatcctggccctgagcccccctgcccagaacctgctgctgaagagctacttcagtgaggagggcattggctacaacatcatcagagtgccaatggccagctgtgacttcagcatcagaacctacacctatgctgacacccctgatgacttccagctgcacaacttcagcctgcctgaggaggacaccaagctgaagatccccctgatccacagagccctgcagctggcccagagacctgtgagcctgctggccagcccctggaccagccccacctggctgaagaccaatggggctgtgaatggcaagggcagcctgaagggccagcctggggacatctaccaccagacctgggccagatactttgtgaagttcctggatgcctatgctgagcacaagctgcagttctgggctgtgacagctgagaatgagcccagtgctggcctgctgagtggctaccccttccagtgcctgggcttcacccctgagcaccagagagacttcattgccagagacctgggccccaccctggccaacagcacccaccacaatgtgagactgctgatgctggatgaccagagactgctgctgccccactgggccaaggtggtgctgacagaccctgaggctgccaagtatgtgcatggcattgctgtgcactggtacctggacttcctggcccctgccaaggccaccctgggggagacccacagactgttccccaacaccatgctgtttgccagtgaggcctgtgtgggcagcaagttctgggagcagagtgtgagactgggcagctgggacagaggcatgcagtacagccacagcatcatcaccaacctgctgtaccatgtggtgggctggacagactggaacctggccctgaaccctgaggggggccccaactgggtgagaaactttgtggacagccccatcattgtggacatcaccaaggacaccttctacaagcagcccatgttctaccacctgggccacttcagcaagttcatccctgagggcagccagagagtgggcctggtggccagccagaagaatgacctggatgctgtggccctgatgcaccctgatggcagtgctgtggtggtggtgctgaacagaagcagcaaggatgtgcccctgaccatcaaggaccctgctgtgggcttcctggagaccatcagccctggctacagcatccacacctacctgtggagaagacagtga

SEQ ID NO: 113 - DNA, 1611 bp, synthetic construct
  misc_feature 1..1611: note = Codon optimized CO2-GBA1
  source 1..1611: mol_type = other DNA
atggagtttagcagccctagcagagaggaatgccccaagcctctgagccgggtgtcaatcatggccggatctctgacaggactgctgctgcttcaggccgtgtcttgggcttctggcgctagaccttgcatccccaagagcttcggctacagcagcgtcgtgtgcgtgtgcaatgccacctactgcgacagcttcgaccctcctacctttcctgctctgggcaccttcagcagatacgagagcaccagatccggcagacggatggaactgagcatgggacccatccaggccaatcacacaggcactggcctgctgctgacactgcagcctgagcagaaattccagaaagtgaaaggcttcggcggagccatgacagatgccgccgctctgaatatcctggctctgtctccaccagctcagaacctgctgctcaagagctacttcagcgaggaaggcatcggctacaacatcatccgggtgccaatggccagctgcgacttcagcatccggacctacacctacgccgacacacccgacgatttccagctgcacaacttcagcctgcctgaagaggacaccaagctgaagatccctctgatccacagagccctgcagctggcacaaagacccgtttctctgctggctagcccctggacatctcccacctggctgaaaacaaatggcgccgtgaatggcaagggcagcctgaaaggccaacctggcgatatctaccaccagacctgggccagatacttcgtgaagttcctggacgcctatgccgagcacaagctgcagttttgggccgtgacagccgagaacgaaccttctgctggactgctgagcggctacccctttcagtgcctgggctttacacccgagcaccagcgggactttatcgccagagatctgggacccacactggccaatagcacccaccataatgtgcggctgctgatgctggacgaccagagactgcttctgccccactgggctaaagtggtgctgacagatcctgaggccgccaaatacgtgcacggaatcgccgtgcactggtatctggactttctggcccctgccaaggccacactgggagagacacacagactgttccccaacaccatgctgttcgccagcgaagcctgtgtgggcagcaagttttgggaacagagcgtgcggctcggcagctgggatagaggcatgcagtacagccacagcatcatcaccaacctgctgtaccacgtcgtcggctggaccgactggaatctggccctgaatcctgaaggcggccctaactgggtccgaaacttcgtggacagccccatcatcgtggacatcaccaaggacaccttctacaagcagcccatgttctaccacctgggacacttcagcaagttcatccccgagggctctcagcgcgttggactggtggccagccagaagaatgatctggacgccgtggctctgatgcaccctgatggatctgctgtggtggtggtcctgaaccgcagcagcaaagatgtgcccctgaccatcaaggatcccgccgtgggattcctggaaacaatcagccctggctactccatccacacctacctgtggcggagacagtga

SEQ ID NO: 114 - DNA, 1962 bp, Homo sapiens
  misc_feature 1..1962: note = Iduronidase alpha-L- (IDUA)
  source 1..1962: mol_type = genomic DNA
atgcgtcccctgcgcccccgcgccgcgctgctggcgctcctggcctcgctcctggccgcgcccccggtggccccggccgaggccccgcacctggtgcatgtggacgcggcccgcgcgctgtggcccctgcggcgcttctggaggagcacaggcttctgccccccgctgccacacagccaggctgaccagtacgtcctcagctgggaccagcagctcaacctcgcctatgtgggcgccgtccctcaccgcggcatcaagcaggtccggacccactggctgctggagcttgtcaccaccagggggtccactggacggggcctgagctacaacttcacccacctggacgggtacctggaccttctcagggagaaccagctcctcccagggtttgagctgatgggcagcgcctcgggccacttcactgactttgaggacaagcagcaggtgtttgagtggaaggacttggtctccagcctggccaggagatacatcggtaggtacggactggcgcatgtttccaagtggaacttcgagacgtggaatgagccagaccaccacgactttgacaacgtctccatgaccatgcaaggcttcctgaactactacgatgcctgctcggagggtctgcgcgccgccagccccgccctgcggctgggaggccccggcgactccttccacaccccaccgcgatccccgctgagctggggcctcctgcgccactgccacgacggtaccaacttcttcactggggaggcgggcgtgcggctggactacatctccctccacaggaagggtgcgcgcagctccatctccatcctggagcaggagaaggtcgtcgcgcagcagatccggcagctcttccccaagttcgcggacacccccatttacaacgacgaggcggacccgctggtgggctggtccctgccacagccgtggagggcggacgtgacctacgcggccatggtggtgaaggtcatcgcgcagcatcagaacctgctactggccaacaccacctccgccttcccctacgcgctcctgagcaacgacaatgccttcctgagctaccacccgcaccccttcgcgcagcgcacgctcaccgcgcgcttccaggtcaacaacacccgcccgccgcacgtgcagctgttgcgcaagccggtgctcacggccatggggctgctggcgctgctggatgaggagcagctctgggccgaagtgtcgcaggccgggaccgtcctggacagcaaccacacggtgggcgtcctggccagcgcccaccgcccccagggcccggccgacgcctggcgcgccgcggtgctgatctacgcgagcgacgacacccgcgcccaccccaaccgcagcgtcgcggtgaccctgcggctgcgcggggtgccccccggcccgggcctggtctacgtcacgcgctacctggacaacgggctctgcagccccgacggcgagtggcggcgcctgggccggcccgtcttccccacggcagagcagttccggcgcatgcgcgcggctgaggacccggtggccgcggcgccccgccccttacccgccggcggccgcctgaccctgcgccccgcgctgcggctgccgtcgcttttgctggtgcacgtgtgtgcgcgccccgagaagccgcccgggcaggtcacgcggctccgcgccctgcccctgacccaagggcagctggttctggtctggtcggatgaacacgtgggctccaagtgcctgtggacatacgagatccagttctctcaggacggtaaggcgtacaccccggtcagcaggaagccatcgaccttcaacctctttgtgttcagcccagacacaggtgctgtctctggctcctaccgagttcgagccctggactactgggcccgaccaggccccttctcggaccctgtgccgtacctggaggtccctgtgccaagagggcccccatccccgggcaatccatga

SEQ ID NO: 115 - DNA, 1962 bp, synthetic construct
  misc_feature 1..1962: note = Codon optimized CO1-IDUA
  source 1..1962: mol_type = other DNA
atgagacccctgagacccagagctgccctgctggccctgctggccagcctgctggctgccccccctgtggcccctgctgaggccccccaccttgtacatgtggatgctgccagagccctgtggcccctgagaagattctggagaagcacaggcttctgcccccccctgccccacagccaggctgaccagtatgtgctgagctgggaccagcagctgaacctggcctatgtgggggctgtgccccacagaggcatcaagcaggtgagaacccactggctgctggagctggtgaccaccagaggcagcacaggcagaggcctgagctacaacttcacccacctggatggctacctggacctgctgagagagaaccagctgctgcctggctttgagctgatgggcagtgccagtggccacttcacagactttgaggacaagcagcaggtgtttgagtggaaggacctggtgagcagcctggccagaagatacattggcagatatggcctggcccatgtgagcaagtggaactttgagacctggaatgagcctgaccaccatgactttgacaatgtgagcatgaccatgcagggcttcctgaactactatgatgcctgcagtgagggcctgagagctgccagccctgccctgagactggggggccctggggacagcttccacaccccccccagaagccccctgagctggggcctgctgagacactgccatgatggcaccaacttcttcacaggggaggctggggtgagactggactacatcagcctgcacagaaagggggccagaagcagcatcagcatcctggagcaggagaaggtggtggcccagcagatcagacagctgttccccaagtttgctgacacccccatctacaatgatgaggctgaccccctggtgggctggagcctgccccagccctggagagctgatgtgacctatgctgccatggtggtgaaggtgattgcccagcaccagaacctgctgctggccaacaccaccagtgccttcccctatgccctgctgagcaatgacaatgccttcctgagctaccacccccacccctttgcccagagaaccctgacagccagattccaggtgaacaacaccagacccccccatgtgcagctgctgagaaagcctgtgctgacagccatgggcctgctggccctgctggatgaggagcagctgtgggctgaggtgagccaggctggcacagtgctggacagcaaccacacagtgggggtgctggccagtgcccacagaccccagggccctgctgatgcctggagagctgctgtgctgatctatgccagtgatgacaccagagcccaccccaacagaagtgtggctgtgaccctgagactgagaggggtgccccctggccctggcctggtgtatgtgaccagatacctggacaatggcctgtgcagccctgatggggagtggagaagactgggcagacctgtgttccccacagctgagcagttcagaagaatgagagctgctgaggaccctgtggctgctgcccccagacccctgcctgctgggggcagactgaccctgagacctgccctgagactgcccagcctgctgctggtgcatgtgtgtgccagacctgagaagccccctggccaggtgaccagactgagagccctgcccctgacccagggccagctggtgctggtgtggagtgatgagcatgtgggcagcaagtgcctgtggacctatgagatccagttcagccaggatggcaaggcctacacccctgtgagcagaaagcccagcaccttcaacctgtttgtgttcagccctgacacaggggctgtgagtggcagctacagagtgagagccctggactactgggccagacctggccccttcagtgaccctgtgccctacctggaggtgcctgtgcccagaggcccccccagccctggcaacccctga

SEQ ID NO: 116 - DNA, 1578 bp, Homo sapiens
  misc_feature 1..1578: note = Cytochrome P450 family 4 subfamily V member 2 (CYP4V2)
  source 1..1578: mol_type = genomic DNA
atggcggggctctggctggggctcgtgtggcagaagctgctgctgtggggcgcggcgagtgccctttccctggccggcgccagtctggtcctgagcctgctgcagagggtggcgagctacgcgcggaaatggcagcagatgcggcccatccccacggtggcccgcgcctacccactggtgggccacgcgctgctgatgaagccggacgggcgagaattttttcagcagatcattgagtacacagaggaataccgccacatgccgctgctgaagctctgggtcgggccagtgcccatggtggccctttataatgcagaaaatgtggaggtaattttaactagttcaaagcaaattgacaaatcctctatgtacaagtttttagaaccatggcttggcctaggacttcttacaagtactggaaacaaatggcgctccaggagaaagatgttaacacccactttccattttaccattctggaagatttcttagatatcatgaatgaacaagcaaatatattggttaagaaacttgaaaaacacattaaccaagaagcatttaactgctttttttacatcactctttgtgccttagatatcatctgtgaaacagctatggggaagaatattggtgctcaaagtaatgatgattccgagtatgtccgtgcagtttatagaatgagtgagatgatatttcgaagaataaagatgccctggctttggcttgatctctggtatcttatgtttaaagaaggatgggaacacaaaaagagccttcagatcctacatacttttaccaacagtgtcatcgctgaacgggccaatgaaatgaacgccaatgaagactgtagaggtgatggcaggggctctgccccctccaaaaataaacgcagggcctttcttgacttgcttttaagtgtgactgatgacgaagggaacaggctaagtcatgaagatattcgagaagaagttgacaccttcatgtttgaggggcacgatacaactgcagctgcaataaactggtccttatacctgttgggttctaacccagaagtccagaaaaaagtggatcatgaattggatgacgtgtttgggaagtctgaccgtcccgctacagtagaagacctgaagaaacttcggtatctggaatgtgttattaaggagacccttcgcctttttccttctgttcctttatttgcccgtagtgttagtgaagattgtgaagtggcaggttacagagttctaaaaggcactgaagccgtcatcattccctatgcattgcacagagatccgagatacttccccaaccccgaggagttccagcctgagcggttcttccccgagaatgcacaagggcgccatccatatgcctacgtgcccttctctgctggccccaggaactgtataggtcaaaagtttgctgtgatggaagaaaagaccattctttcgtgcatcctgaggcacttttggatagaatccaaccagaaaagagaagagcttggtctagaaggacagttgattcttcgtccaagtaatggcatctggatcaagttgaagaggagaaatgcagatgaacgctaa

SEQ ID NO: 117 - DNA, 675 bp, Homo sapiens
  misc_feature 1..675: note = Retinoschisin 1 (RS1)
  source 1..675: mol_type = genomic DNA
atgagccgcaagatagaaggctttttgttattacttctctttggctatgaagccacattgggattatcgtctaccgaggatgaaggcgaggacccctggtatcaaaaagcatgcaagtgcgattgccaaggaggacccaatgctctgtggtctgcaggtgccacctccttggactgtataccagaatgcccatatcacaagcctctgggtttcgagtcaggggaggtcacaccggaccagatcacctgctctaacccggagcagtatgtgggctggtattcttcgtggactgcaaacaaggcccggctcaacagtcaaggctttgggtgtgcctggctctccaagttccaggacagtagccagtggttacagatagatctgaaggagatcaaagtgatttcagggatcctcacccaggggcgctgtgacatcgatgagtggatgaccaagtacagcgtgcagtacaggaccgatgagcgcctgaactggatttactacaaggaccagactggaaacaaccgggtcttctatggcaactcggaccgcacctccacggttcagaacctgctgcggccccccatcatctcccgcttcatccgcctcatcccgctgggctggcacgtccgcattgccatccggatggagctgctggagtgcgtcagcaagtgtgcctga

SEQ ID NO: 118 - DNA, 2565 bp, Homo sapiens
  misc_feature 1..2565: note = Phosphodiesterase 6B (PDE6B)
  source 1..2565: mol_type = genomic DNA
atgagcctcagtgaggagcaggcccggagctttctggaccagaaccccgattttgcccgccagtactttgggaagaaactgagccctgagaatgtggccgcggcctgcgaggacgggtgcccgccggactgcgacagcctccgggacctctgccaggtggaggagagcacggcgctgctggagctggtgcaggatatgcaggagagcatcaacatggagcgcgtggtcttcaaggtcctgcggcgcctctgcaccctgctgcaggccgaccgctgcagcctcttcatgtaccgccagcgcaacggcgtggccgagctggccaccaggcttttcagcgtgcagccggacagcgtcctggaggactgcctggtgccccccgactccgagatcgtcttcccactggacatcggggtcgtgggccacgtggctcagaccaaaaagatggtgaacgtcgaggacgtggccgagtgccctcacttcagctcatttgctgacgagctcactgactacaagacaaagaatatgctggccacacccatcatgaatggcaaagacgtcgtggcggtgatcatggcagtgaacaagctcaacggcccattcttcaccagcgaagacgaagatgtgttcttgaagtacctgaattttgccacgttgtacctgaaaatctatcacctgagctacctccacaactgcgagacgcgccgcggccaggtgctgctgtggtcggccaacaaggtgtttgaggagctgacggacatcgagaggcagttccacaaggccttctacacggtgcgggcctacctcaactgcgagcggtactccgtgggcctcctggacatgaccaaggagaaggaattttttgacgtgtggtctgtgctgatgggagagtcccagccgtactcgggcccacgcacgcctgatggccgggaaattgtcttctacaaagtgatcgactacatcctccacggcaaggaggagatcaaggtcattcccacaccctcagccgatcactgggccctggccagcggccttccaagctacgtggcagaaagcggctttatttgtaacatcatgaatgcttccgctgacgaaatgttcaaatttcaggaaggggccctggacgactccgggtggctcatcaagaatgtgctgtccatgcccatcgtcaacaagaaggaggagattgtgggagtcgccacattttacaacaggaaagacgggaagccctttgacgaacaggacgaggttctcatggagtccctgacacagttcctgggctggtcagtgatgaacaccgacacctacgacaagatgaacaagctggagaaccgcaaggacatcgcacaggacatggtcctttaccacgtgaagtgcgacagggacgagatccagctcatcctgccaaccagagcgcgcctggggaaggagcctgctgactgcgatgaggacgagctgggcgaaatcctgaaggaggagctgccagggcccaccacatttgacatctacgaattccacttctctgacctggagtgcaccgaactggacctggtcaaatgtggcatccagatgtactacgagctgggcgtggtccgaaagttccagatcccccaggaggtcctggtgcggttcctgttctccatcagcaaaggctaccggagaatcacctaccacaactggcgccacggcttcaacgtggcccagacgatgttcacgctgctcatgaccggcaaactgaagagctactacacggacctggaggccttcgccatggtgacagccggcctgtgccatgacatcgaccaccgcggcaccaacaacctgtaccagatgaagtcccagaaccccttggctaaactccacggctcctcgattttggagcggcaccacctggagtttgggaagttcctgctctcggaggagaccctgaacatctaccagaacctgaaccggcggcagcacgagcacgtgatccacctgatggacatcgccatcatcgccacggacctggccctgtacttcaagaagagagcgatgtttcagaagatcgtggatgagtccaagaactaccaggacaagaagagctgggtggagtacctgtccctggagacgacccggaaggagatcgtcatggccatgatgatgacagcctgcgacctgtctgccatcaccaagccctgggaagtccagagcaaggtcgcacttctcgtggctgctgagttctgggagcaaggtgacttggaaaggacagtcttggatcagcagcccattcctatgatggaccggaacaaggcggccgagctccccaagctgcaagtgggcttcatcgacttcgtgtgcacattcgtgtacaaggagttctctcgtttccacgaagagatcctgcccatgttcgaccgactgcagaacaataggaaagagtggaaggcgctggctgatgagtatgaggccaaagtgaaggctctggaggagaaggaggaggaggagagggtggcagccaagaaagtaggcacagaaatttgcaatggcggcccagcacccaagtcttcaacctgctgtatcctgtga

SEQ ID NO: 119 - DNA, 1497 bp, Homo sapiens
  misc_feature 1..1497: note = Methyl-CpG Binding Protein (MeCP2)
  source 1..1497: mol_type = genomic DNA
atggccgccgccgccgccgccgcgccgagcggaggaggaggaggaggcgaggaggagagactggaagaaaagtcagaagaccaggacctccagggcctcaaggacaaacccctcaagtttaaaaaggtgaagaaagataagaaagaagagaaagagggcaagcatgagcccgtgcagccatcagcccaccactctgctgagcccgcagaggcaggcaaagcagagacatcagaagggtcaggctccgccccggctgtgccggaagcttctgcctcccccaaacagcggcgctccatcatccgtgaccggggacccatgtatgatgaccccaccctgcctgaaggctggacacggaagcttaagcaaaggaaatctggccgctctgctgggaagtatgatgtgtatttgatcaatccccagggaaaagcctttcgctctaaagtggagttgattgcgtacttcgaaaaggtaggcgacacatccctggaccctaatgattttgacttcacggtaactgggagagggagcccctcccggcgagagcagaaaccacctaagaagcccaaatctcccaaagctccaggaactggcagaggccggggacgccccaaagggagcggcaccacgagacccaaggcggccacgtcagagggtgtgcaggtgaaaagggtcctggagaaaagtcctgggaagctccttgtcaagatgccttttcaaacttcgccagggggcaaggctgaggggggtggggccaccacatccacccaggtcatggtgatcaaacgccccggcaggaagcgaaaagctgaggccgaccctcaggccattcccaagaaacggggccgaaagccggggagtgtggtggcagccgctgccgccgaggccaaaaagaaagccgtgaaggagtcttctatccgatctgtgcaggagaccgtactccccatcaagaagcgcaagacccgggagacggtcagcatcgaggtcaaggaagtggtgaagcccctgctggtgtccaccctcggtgagaagagcgggaaaggactgaagacctgtaagagccctgggcggaaaagcaaggagagcagccccaaggggcgcagcagcagcgcctcctcaccccccaagaaggagcaccaccaccatcaccaccactcagagtccccaaaggcccccgtgccactgctcccacccctgcccccacctccacctgagcccgagagctccgaggaccccaccagcccccctgagccccaggacttgagcagcagcgtctgcaaagaggagaagatgcccagaggaggctcactggagagcgacggctgccccaaggagccagctaagactcagcccgcggttgccaccgccgccacggccgcagaaaagtacaaacaccgaggggagggagagcgcaaagacattgtttcatcctccatgccaaggccaaacagagaggagcctgtggacagccggacgcccgtgaccgagagagttagctag

SEQ ID NO: 120 - DNA, 2232 bp, Homo sapiens
  misc_feature 1..2232: note = N-acetyl-alpha-glucosaminidase (NAGLU)
  source 1..2232: mol_type = genomic DNA
atggaggcggtggcggtggccgcggcggtgggggtccttctcctggccggggccgggggcgcggcaggcgacgaggcccgggaggcggcggccgtgcgggcgctcgtggcccggctgctggggccaggccccgcggccgacttctccgtgtcggtggagcgcgctctggctgccaagccgggcttggacacctacagcctgggcggcggcggcgcggcgcgcgtgcgggtgcgcggctccacgggcgtggcggccgccgcggggctgcaccgctacctgcgcgacttctgtggctgccacgtggcctggtccggctctcagctgcgcctgccgcggccactgccagccgtgccgggggagctgaccgaggccacgcccaacaggtaccgctattaccagaatgtgtgcacgcaaagctactccttcgtgtggtgggactgggcccgctgggagcgagagatagactggatggcgctgaatggcatcaacctggcactggcctggagcggccaggaggccatctggcagcgggtgtacctggccttgggcctgacccaggcagagatcaatgagttctttactggtcctgccttcctggcctgggggcgaatgggcaacctgcacacctgggatggccccctgcccccctcctggcacatcaagcagctttacctgcagcaccgggtcctggaccagatgcgctccttcggcatgaccccagtgctgcctgcattcgcggggcatgttcccgaggctgtcaccagggtgttccctcaggtcaatgtcacgaagatgggcagttggggccactttaactgttcctactcctgctccttccttctggctccggaagaccccatattccccatcatcgggagcctcttcctgcgagagctgatcaaagagtttggcacagaccacatctatggggccgacactttcaatgagatgcagccaccttcctcagagccctcctaccttgccgcagccaccactgccgtctatgaggccatgactgcagtggatactgaggctgtgtggctgctccaaggctggctcttccagcaccagccgcagttctgggggcccgcccagatcagggctgtgctgggagctgtgccccgtggccgcctcctggttctggacctgtttgctgagagccagcctgtgtatacccgcactgcctccttccagggccagcccttcatctggtgcatgctgcacaactttgggggaaaccatggtctttttggagccctagaggctgtgaacggaggcccagaagctgcccgcctcttccccaactccaccatggtaggcacgggcatggcccccgagggcatcagccagaacgaagtggtctattccctcatggctgagctgggctggcgaaaggacccagtgccagatttggcagcctgggtgaccagctttgccgcccggcggtatggggtctcccacccggacgcaggggcagcgtggaggctactgctccggagtgtgtacaactgctccggggaggcctgcaggggccacaatcgtagcccgctggtcaggcggccgtccctacagatgaataccagcatctggtacaaccgatctgatgtgtttgaggcctggcggctgctgctcacatctgctccctccctggccaccagccccgccttccgctacgacctgctggacctcactcggcaggcagtgcaggagctggtcagcttgtactatgaggaggcaagaagcgcctacctgagcaaggagctggcctccctgttgagggctggaggcgtcctggcctatgagctgctgccggcactggacgaggtgctggctagtgacagccgcttcttgctgggcagctggctagagcaggcccgagcagcggcagtcagtgaggccgaggccgatttctacgagcagaacagccgctaccagctgaccttgtgggggccagaaggcaacatcctggactatgccaacaagcagctggcggggttggtggccaactactacacccctcgctggcggcttttcctggaggcgctggttgacagtgtggcccagggcatccctttccaacagcaccagtttgacaaaaatgtcttccaactggagcaggccttcgttctcagcaagcagaggtaccccagccagccgcgaggagacactgtggacctggccaagaagatcttcctcaaatattaccccggctgggtggccggctcttggtga

SEQ ID NO: 121 - DNA, 1317 bp, Homo sapiens; identical to SEQ ID NO: 12
  misc_feature 1..1317: note = Ceroid Lipofuscinosis, Neuronal 3 (CLN3)
  source 1..1317: mol_type = genomic DNA

SEQ ID NO: 122 - DNA, 1317 bp, synthetic construct; identical to SEQ ID NO: 13
  misc_feature 1..1317: note = Codon optimized CO1-CLN3
  source 1..1317: mol_type = other DNA

SEQ ID NO: 123 - DNA, 2859 bp, Homo sapiens
  misc_feature 1..2859: note = Acid Alpha-Glucosidase (GAA)
  source 1..2859: mol_type = genomic DNA
atgggagtgaggcacccgccctgctcccaccggctcctggccgtctgcgccctcgtgtccttggcaaccgctgcactcctggggcacatcctactccatgatttcctgctggttccccgagagctgagtggctcctccccagtcctggaggagactcacccagctcaccagcagggagccagcagaccagggccccgggatgcccaggcacaccccggccgtcccagagcagtgcccacacagtgcgacgtcccccccaacagccgcttcgattgcgcccctgacaaggccatcacccaggaacagtgcgaggcccgcggctgttgctacatccctgcaaagcaggggctgcagggagcccagatggggcagccctggtgcttcttcccacccagctaccccagctacaagctggagaacctgagctcctctgaaatgggctacacggccaccctgacccgtaccacccccaccttcttccccaaggacatcctgaccctgcggctggacgtgatgatggagactgagaaccgcctccacttcacgatcaaagatccagctaacaggcgctacgaggtgcccttggagaccccgcatgtccacagccgggcaccgtccccactctacagcgtggagttctccgaggagcccttcggggtgatcgtgcgccggcagctggacggccgcgtgctgctgaacacgacggtggcgcccctgttctttgcggaccagttccttcagctgtccacctcgctgccctcgcagtatatcacaggcctcgccgagcacctcagtcccctgatgctcagcaccagctggaccaggatcaccctgtggaaccgggaccttgcgcccacgcccggtgcgaacctctacgggtctcaccctttctacctggcgctggaggacggcgggtcggcacacggggtgttcctgctaaacagcaatgccatggatgtggtcctgcagccgagccctgcccttagctggaggtcgacaggtgggatcctggatgtctacatcttcctgggcccagagcccaagagcgtggtgcagcagtacctggacgttgtgggatacccgttcatgccgccatactggggcctgggcttccacctgtgccgctggggctactcctccaccgctatcacccgccaggtggtggagaacatgaccagggcccacttccccctggacgtccagtggaacgacctggactacatggactcccggagggacttcacgttcaacaaggatggcttccgggacttcccggccatggtgcaggagctgcaccagggcggccggcgctacatgatgatcgtggatcctgccatcagcagctcgggccctgccgggagctacaggccctacgacgagggtctgcggaggggggttttcatcaccaacgagaccggccagccgctgattgggaaggtatggcccgggtccactgccttccccgacttcaccaaccccacagccctggcctggtgggaggacatggtggctgagttccatgaccaggtgcccttcgacggcatgtggattgacatgaacgagccttccaacttcatcaggggctctgaggacggctgccccaacaatgagctggagaacccaccctacgtgcctggggtggttggggggaccctccaggcggccaccatctgtgcctccagccaccagtttctctccacacactacaacctgcacaacctctacggcctgaccgaagccatcgcctcccacagggcgctggtgaaggctcgggggacacgcccatttgtgatctcccgctcgacctttgctggccacggccgatacgccggccactggacgggggacgtgtggagctcctgggagcagctcgcctcctccgtgccagaaatcctgcagtttaacctgctgggggtgcctctggtcggggccgacgtctgcggcttcctgggcaacacctcagaggagctgtgtgtgcgctggacccagctgggggccttctaccccttcatgcggaaccacaacagcctgctcagtctgccccaggagccgtacagcttcagcgagccggcccagcaggccatgaggaaggccctcaccctgcgctacgcactcctcccccacctctacacactgttccaccaggcccacgtcgcgggggagaccgtggcccggcccctcttcctggagttccccaaggactctagcacctggactgtggaccaccagctcctgtggggggaggccctgctcatcaccccagtgctccaggccgggaaggccgaagtgactggctacttccccttgggcacatggtacgacctgcagacggtgccagtagaggcccttggcagcctcccacccccacctgcagctccccgtgagccagccatccacagcgaggggcagtgggtgacgctgccggcccccctggacaccatcaacgtccacctccgggctgggtacatcatccccctgcagggccctggcctcacaaccacagagtcccgccagcagcccatggccctggctgtggccctgaccaagggtggggaggcccgaggggagctgttctgggacgatggagagagcctggaagtgctggagcgaggggcctacacacaggtcatcttcctggccaggaataacacgatcgtgaatgagctggtacgtgtgaccagtgagggagctggcctgcagctgcagaaggtgactgtcctgggcgtggccacggcgccccagcaggtcctctccaacggtgtccctgtctccaacttcacctacagccccgacaccaaggtcctggacatctgtgtctcgctgttgatgggagagcagtttctcgtcagctggtgttag

SEQ ID NO: 124 - DNA, 2859 bp, synthetic construct; identical to SEQ ID NO: 5
  misc_feature 1..2859: note = Codon optimized CO1-GAA
  source 1..2859: mol_type = other DNA

SEQ ID NO: 125 - DNA, 2859 bp, synthetic construct; identical to SEQ ID NO: 7
  misc_feature 1..2859: note = Codon optimized CO2-GAA
  source 1..2859: mol_type = other DNA

SEQ ID NO: 126 - DNA, 2859 bp, synthetic construct
  misc_feature 1..2859: note = Codon optimized CO3-GAA
  source 1..2859: mol_type = other DNA
atgggggtgagacaccccccctgcagccacagactgctggctgtgtgtgccctggtgagcctggccacagctgccctgctgggccacatcctgctgcatgacttcctactagtgcccagagagctgagtggcagcagccctgtgctggaggagacccaccctgcccaccagcagggggccagcagacctggccccagagatgcccaggcccaccctggcagacccagagctgtgcccacccagtgtgatgtgccccccaacagcagatttgactgtgcccctgacaaggccatcacccaggagcagtgtgaggccagaggctgctgctacatccctgccaagcagggcctgcagggggcccagatgggccagccctggtgcttcttcccccccagctaccccagctacaagctggagaacctgagcagcagtgagatgggctacacagccaccctgaccagaaccacccccaccttcttccccaaggacatcctgaccctgagactggatgtgatgatggagacagagaacagactgcacttcaccatcaaggaccctgccaacagaagatatgaggtgcccctggagaccccccatgtgcacagcagagcccccagccccctgtacagtgtggagttcagtgaggagccctttggggtgattgtgagaagacagctggatggcagagtgctgctgaacaccacagtggcccccctgttctttgctgaccagttcctgcagctgagcaccagcctgcccagccagtacatcacaggcctggctgagcacctgagccccctgatgctgagcaccagctggaccagaatcaccctgtggaacagagacctggcccccacccctggggccaacctgtatggcagccaccccttctacctggccctggaggatgggggcagtgcccatggggtgttcctgctgaacagcaatgccatggatgtggtgctgcagcccagccctgccctgagctggagaagcacagggggcatcctggatgtgtacatcttcctgggccctgagcccaagagtgtggtgcagcagtacctggatgtggtgggctaccccttcatgcccccctactggggcctgggcttccacctgtgcagatggggctacagcagcacagccatcaccagacaggtggtggagaacatgaccagagcccacttccccctggatgtgcagtggaatgacctggactacatggacagcagaagagacttcaccttcaacaaggatggcttcagagacttccctgccatggtgcaggagctgcaccaggggggcagaagatacatgatgattgtggaccctgccatcagcagcagtggccctgctggcagctacagaccctatgatgagggcctgagaagaggggtgttcatcaccaatgagacaggccagcccctgattggcaaggtgtggcctggcagcacagccttccctgacttcaccaaccccacagccctggcctggtgggaggacatggtggctgagttccatgaccaggtgccctttgatggcatgtggattgacatgaatgagcccagcaacttcatcagaggcagtgaggatggctgccccaacaatgagctggagaaccccccctatgtgcctggggtggtggggggcaccctgcaggctgccaccatctgtgccagcagccaccagttcctgagcacccactacaacctgcacaacctgtatggcctgacagaggccattgccagccacagagccctggtgaaggccagaggcaccagaccctttgtgatcagcagaagcacctttgctggccatggcagatatgctggccactggacaggggatgtgtggagcagctgggagcagctggccagcagtgtgcctgagatcctgcagttcaacctgctgggggtgcccctggtgggggctgatgtgtgtggcttcctgggcaacaccagtgaggagctgtgtgtgagatggacccagctgggggccttctaccccttcatgagaaaccacaacagcctgctgagcctgccccaggagccctacagcttcagtgagcctgcccagcaggccatgagaaaggccctgaccctgagatatgccctgctgccccacctgtacaccctgttccaccaggcccatgtggctggggagacagtggccagacccctgttcctggagttccccaaggacagcagcacctggacagtggaccaccagctgctgtggggggaggccctgctgatcacccctgtgctgcaggctggcaaggctgaggtgacaggctacttccccctgggcacctggtatgacctgcagacagtgcctgtggaggccctgggcagcctgccccccccccctgctgcccccagagagcctgccatccacagtgagggccagtgggtgaccctgcctgcccccctggacaccatcaatgtgcacctgagagctggctacatcatccccctgcagggccctggcctgaccaccacagagagcagacagcagcccatggccctggctgtggccctgaccaaggggggggaggccagaggggagctgttctgggatgatggggagagcctggaggtgctggagagaggggcctacacccaggtgatcttcctggccagaaacaacaccattgtgaatgagctggtgagagtgaccagtgagggggctggcctgcagctgcagaaggtgacagtgctgggggtggccacagccccccagcaggtgctgagcaatggggtgcctgtgagcaacttcacctacagccctgacaccaaggtgctggacatctgtgtgagcctgctgatgggggagcagttcctggtgagctggtgctga

SEQ ID NO: 127 - DNA, 1290 bp, Homo sapiens; identical to SEQ ID NO: 9
  misc_feature 1..1290: note = note - Alpha-Galactosidase A (GLA)
  source 1..1290: mol_type = genomic DNA

SEQ ID NO: 128 - DNA, 1290 bp, synthetic construct; identical to SEQ ID NO: 10
  misc_feature 1..1290: note = Codon optimized CO1-GLA
  source 1..1290: mol_type = other DNA

SEQ ID NO: 129 - DNA, 1377 bp, synthetic construct
  misc_feature 1..1377: note = Codon optimized + GET, CO1-GLA-GET
  source 1..1377: mol_type = other DNA
atgcagctgagaaatcctgaactgcacctgggctgtgccctggctctgagatttctggctctggtgtcctgggacattcctggcgctagagccctggataatggcctggccagaacacctacaatgggctggctgcactgggagagattcatgtgcaacctggactgccaagaggaacccgacagctgcatcagcgagaagctgttcatggaaatggccgagctgatggtgtccgaaggctggaaggatgccggctacgagtacctgtgcatcgacgattgctggatggcccctcagagagattctgagggcagactgcaggccgatcctcagagatttcctcacggaatccggcagctggccaactacgtgcactctaagggactgaagctgggcatctacgccgacgtgggcaacaagacatgtgccggctttccaggcagcttcggctactacgatatcgacgcccagacctttgccgattggggcgtcgacctgctgaagttcgatggctgctactgcgacagcctggaaaacctggccgacggctacaaacacatgtctctggccctgaaccggaccggcagatctatcgtgtactcttgcgagtggcccctgtacatgtggcccttccagaagcctaactacaccgagatcagacagtactgcaaccactggcggaacttcgccgacatcgatgacagctggaagtccatcaagagcatcctggactggaccagcttcaatcaagagcggatcgtggatgtggctggcccaggcggatggaacgatcctgatatgctggtcatcggcaacttcggcctgagctggaatcagcaagtgacccagatggccctgtgggccattatggccgctcctctgttcatgagcaacgacctgagacacatcagccctcaggccaaggctctgctgcaggataaggacgtgatcgccatcaaccaggatcctctgggcaagcagggctatcagctgagacagggcgacaatttcgaagtgtgggaaagacctctgagcggcctggcttgggccgtcgccatgatcaatagacaagagatcggcggaccccggtcctatacaattgccgtggcttctctcggaaaaggcgtggcctgcaatcctgcctgctttatcacacagctgctccccgtgaagagaaagctgggcttttacgagtggaccagcagactgagatcccacatcaaccccacaggcactgttctgctgcaactggaaaacacaatgcagatgagcctgaaggacctgctgcggagaagaagaaggcgcagacgcaagcgcaagaagaaaggcaaaggcctcggcaagaagcgggacccctgtctgagaaagtacaagtaa

SEQ ID NO: 130 - DNA, 1290 bp, synthetic construct
  misc_feature 1..1290: note = Codon optimized CO2-GLA
  source 1..1290: mol_type = other DNA
atgcagctgagaaaccctgagctgcacctgggctgtgccctggccctgagattcctggccctggtgagctgggacatccctggggccagagccctggacaatgggctagccagaacccccaccatgggctggctgcactgggagagattcatgtgcaacctggactgccaggaggagcctgacagctgcatcagtgagaagctgttcatggagatggctgagctgatggtgagtgagggctggaaggatgctggctatgagtacctgtgcattgatgactgctggatggccccccagagagacagtgagggcagactgcaggctgacccccagagattcccccatggcatcagacagctggccaactatgtgcacagcaagggcctgaagctgggcatctatgctgatgtgggcaacaagacctgtgctggcttccctggcagctttggctactatgacattgatgcccagacctttgctgactggggggtggacctgctgaagtttgatggctgctactgtgacagcctggagaacctggctgatggctacaagcacatgagcctggccctgaacagaacaggcagaagcattgtgtacagctgtgagtggcccctgtacatgtggcccttccagaagcccaactacacagagatcagacagtactgcaaccactggagaaactttgctgacattgatgacagctggaagagcatcaagagcatcctggactggaccagcttcaaccaggagagaattgtggatgtggctggccctgggggctggaatgaccctgacatgctggtgattggcaactttggcctgagctggaaccagcaggtgacccagatggccctgtgggccatcatggctgcccccctgttcatgagcaatgacctgagacacatcagcccccaggccaaggccctgctgcaggacaaggatgtgattgccatcaaccaggaccccctgggcaagcagggctaccagctgagacagggggacaactttgaggtgtgggagagacccctgagtggcctggcctgggctgtggccatgatcaacagacaggagattgggggccccagaagctacaccattgctgtggccagcctgggcaagggggtggcctgcaaccctgcctgcttcatcacccagctgctgcctgtgaagagaaagctgggcttctatgagtggaccagcagactgagaagccacatcaaccccacaggcacagtgctgctgcagctggagaacaccatgcagatgagcctgaaggacctgctgtga

SEQ ID NO: 131 - DNA, 1290 bp, synthetic construct
  misc_feature 1..1290: note = Codon optimized CO3-GLA
  source 1..1290: mol_type = other DNA
atgcagctgagaaaccctgagctgcacctgggctgtgccctggccctgagattcctggccctggtgagctgggacatccctggggccagagccctggacaatgggctagccagaacccccaccatgggctggctgcactgggagagattcatgtgcaacctggactgccaggaggagcctgacagctgcatcagtgagaagctgttcatggagatggctgagctgatggtgagtgagggctggaaggatgctggctatgagtacctgtgcattgatgactgctggatggccccccagagagacagtgagggcagactgcaggctgacccccagagattcccccatggcatcagacagctggccaactatgtgcacagcaagggcctgaagctgggcatctatgctgatgtgggcaacaagacctgtgctggcttccctggcagctttggctactatgacattgatgcccagacctttgctgactggggggtggacctgctgaagtttgatggctgctactgtgacagcctggagaacctggctgatggctacaagcacatgagcctggccctgaacagaacaggcagaagcattgtgtacagctgtgagtggcccctgtacatgtggcccttccagaagcccaactacacagagatcagacagtactgcaaccactggagaaactttgctgacattgatgacagctggaagagcatcaagagcatcctggactggaccagcttcaaccaggagagaattgtggatgtggctggccctgggggctggaatgaccctgacatgctggtgattggcaactttggcctgagctggaaccagcaggtgacccagatggccctgtgggccatcatggctgcccccctgttcatgagcaatgacctgagacacatcagcccccaggccaaggccctgctgcaggacaaggatgtgattgccatcaaccaggaccccctgggcaagcagggctaccagctgagacagggggacaactttgaggtgtgggagagacccctgagtggcctggcctgggctgtggccatgatcaacagacaggagattgggggccccagaagctacaccattgctgtggcttccctgggtaaaggagtggcctgtaatcctgcctgcttcatcacacagctcctccctgtgaaaaggaagctagggttctatgaatggacttcaaggttaagaagtcacataaatcccacaggcactgttttgcttcagctagaaaatacaatgcagatgtcattaaaagacttactttaa

SEQ ID NO: 132 - DNA, 4287 bp, synthetic construct; identical to SEQ ID NO: 4
  misc_feature 1..4287: note = Codon optimized, Cystic Fibrosis Transmembrane Regulator deltaR (CFTRdeltaR) contains R domain deletion
  source 1..4287: mol_type = other DNA

SEQ ID NO: 133 - DNA, 4443 bp, synthetic construct; identical to SEQ ID NO: 93
  misc_feature 1..4443: note = Codon optimized, full length Cystic Fibrosis Transmembrane Regulator (CFTR)
  source 1..4443: mol_type = other DNA

SEQ ID NO: 134 - protein, 502 aa, Homo sapiens
  REGION 1..502: note = Sulfoglucosamine sulfohydrolase (SGSH)
MSCPVPACCALLLVLGLCRARPRNALLLLADDGGFESGAYNNSAIATPHLDALARRSLLFRNAFTSVSSCSPSRASLLTGLPQHQNGMYGLHQDVHHFNSFDKVRSLPLLLSQAGVRTGIIGKKHVGPETVYPFDFAYTEENGSVLQVGRNITRIKLLVRKFLQTQDDQPFFLYVAFHDPHRCGHSQPQYGTFCEKFGNGESGMGRIPDWTPQAYDPLDVLVPYFVPNTPAARADLAAQYTTVGRMDQGVGLVLQELRDAGVLNDTLVIFTSDNGIPFPSGRTNLYWPGTAEPLLVSSPEHPKRWGQVSEAYVSLLDLTPTILDWFSIPYPSYAIFGSKTIHLTGRSLLPALEAEPLWATVFGSQSHHEVTMSYPMRSVQHRHFRLVHNLNFKMPFPIDQDFYVSPTFQDLLNRTTAGQPTGWYKDLRHYYYRARWELYDRSRDPHETQNLATDPRFAQLLEMLRDQLAKWQWETHDPWVCAPDGVLEEKLSPQCQPLHNEL

SEQ ID NO: 135 - protein, 531 aa, synthetic construct
  REGION 1..531: note = Codon optimized + GET CO1-SGSH-GET
MSCPVPACCALLLVLGLCRARPRNALLLLADDGGFESGAYNNSAIATPHLDALARRSLLFRNAFTSVSSCSPSRASLLTGLPQHQNGMYGLHQDVHHFNSFDKVRSLPLLLSQAGVRTGIIGKKHVGPETVYPFDFAYTEENGSVLQVGRNITRIKLLVRKFLQTQDDQPFFLYVAFHDPHRCGHSQPQYGTFCEKFGNGESGMGRIPDWTPQAYDPLDVLVPYFVPNTPAARADLAAQYTTVGRMDQGVGLVLQELRDAGVLNDTLVIFTSDNGIPFPSGRTNLYWPGTAEPLLVSSPEHPKRWGQVSEAYVSLLDLTPTILDWFSIPYPSYAIFGSKTIHLTGRSLLPALEAEPLWATVFGSQSHHEVTMSYPMRSVQHRHFRLVHNLNFKMPFPIDQDFYVSPTFQDLLNRTTAGQPTGWYKDLRHYYYRARWELYDRSRDPHETQNLATDPRFAQLLEMLRDQLAKWQWETHDPWVCAPDGVLEEKLSPQCQPLHNELRRRRRRRRKRKKKGKGLGKKRDPCLRKYK

SEQ ID NO: 136 - protein, 306 aa, synthetic construct
  REGION 1..306: note = Codon optimized Ceroid Lipofuscinosis, Neuronal, 1 (CLN1)
MASPGCLWLLAVALLPWTCASRALQHLDPPAPLPLVIWHGMGDSCCNPLSMGAIKKMVEKKIPGIYVLSLEIGKTLMEDVENSFFLNVNSQVTTVCQALAKDPKLQQGYNAMGFSQGGQFLRAVAQRCPSPPMINLISVGGQHQGVFGLPRCPGESSHICDFIRKTLNAGAYSKVVQERLVQAEYWHDPIKEDVYRNHSIFLADINQERGINESYKKNLMALKKFVMVKFLNDSIVDPVDSEWFGFYRSGQAKETIPLQETSLYTQDRLGLKEMDNAGQLVFLATEGDHLQLSEEWFYAHIIPFLG

SEQ ID NO: 137 - protein, 294 aa, Homo sapiens
  REGION 1..294: note = Survival Motor Neuron 1 (SMN1)
MAMSSGGSGGGVPEQEDSVLFRRGTGQSDDSDIWDDTALIKAYDKAVASFKHALKNGDICETSGKPKTTPKRKPAKKNKSQKKNTAASLQQWKVGDKCSAIWSEDGCIYPATIASIDFKRETCVVVYTGYGNREEQNLSDLLSPICEVANNIEQNAQENENESQVSTDESENSRSPGNKSDNIKPKSAPWNSFLPPPPPMPGPRLGPGKPGLKFNGPPPPPPPPPPHLLSCWLPPFPSGPPIIPPPPPICPDSLDDADALGSMLISWYMSGYHTGYYMGFRQNQKEGRCSHSLN

SEQ ID NO: 138 - protein, 515 aa, Homo sapiens
  REGION 1..515: note = Tissue Non-specific Alkaline Phosphatase (TNALP)
MISPFLVLAIGTCLTNSLVPEKEKDPKYWRDQAQETLKYALELQKLNTNVAKNVIMFLGDGMGVSTVTAARILKGQLHHNPGEETRLEMDKFPFVALSKTYNTNAQVPDSAGTATAYLCGVKANEGTVGVSAATERSRCNTTQGNEVTSILRWAKDAGKSVGIVTTTRVNHATPSAAYAHSADRDWYSDNEMPPEALSQGCKDIAYQLMHNIRDIDVIMGGGRKYMYPKNKTDVEYESDEKARGTRLDGLDLVDTWKSFKPRYKHSHFIWNRTELLTLDPHNVDYLLGLFEPGDMQYELNRNNVTDPSLSEMVVVAIQILRKNPKGFFLLVEGGRIDHGHHEGKAKQALHEAVEMDRAIGQAGSLTSSEDTLTVVTADHSHVFTFGGYTPRGNSIFGLAPMLSDTDKKPFTAILYGNGPGYKVVGGERENVSMVDYAHNNYQAQSAVPLRHETHGGEDVAVFSKGPMAHLLHGVHEQNYVPHVMAYAACIGANLGHCAPASSAGSDDDDDDDDDD

SEQ ID NO: 139 - protein, 211 aa, Homo sapiens
  REGION 1..211: note = Glial Cell Derived Neurotrophic Factor (GDNF)
MKLWDVVAVCLVLLHTASAFPLPAGKRPPEAPAEDRSLGRRRAPFALSSDSNMPEDYPDQFDDVMDFIQATIKRLKRSPDKQMAVLPRRERNRQAAAANPENSRGKGRRGQRGKNRGCVLTAIHLNVTDLGLGYETKEELIFRYCSGSCDAAETTYDKILKNLSRNRRLVSDKVGQACCRPIAFDDDLSFLDDNLVYHILRKHSAKRCGCI

SEQ ID NO: 140 - protein, 536 aa, Homo sapiens
  REGION 1..536: note = Tissue Glucosyl Ceramidase beta (GBA1)
MEFSSPSREECPKPLSRVSIMAGSLTGLLLLQAVSWASGARPCIPKSFGYSSVVCVCNATYCDSFDPPTFPALGTFSRYESTRSGRRMELSMGPIQANHTGTGLLLTLQPEQKFQKVKGFGGAMTDAAALNILALSPPAQNLLLKSYFSEEGIGYNIIRVPMASCDFSIRTYTYADTPDDFQLHNFSLPEEDTKLKIPLIHRALQLAQRPVSLLASPWTSPTWLKTNGAVNGKGSLKGQPGDIYHQTWARYFVKFLDAYAEHKLQFWAVTAENEPSAGLLSGYPFQCLGFTPEHQRDFIARDLGPTLANSTHHNVRLLMLDDQRLLLPHWAKVVLTDPEAAKYVHGIAVHWYLDFLAPAKATLGETHRLFPNTMLFASEACVGSKFWEQSVRLGSWDRGMQYSHSIITNLLYHVVGWTDWNLALNPEGGPNWVRNFVDSPIIVDITKDTFYKQPMFYHLGHFSKFIPEGSQRVGLVASQKNDLDAVALMHPDGSAVVVVLNRSSKDVPLTIKDPAVGFLETISPGYSIHTYLWRRQ

SEQ ID NO: 141 - protein, 653 aa, Homo sapiens
  REGION 1..653: note = Iduronidase alpha-L- (IDUA)
MRPLRPRAALLALLASLLAAPPVAPAEAPHLVHVDAARALWPLRRFWRSTGFCPPLPHSQADQYVLSWDQQLNLAYVGAVPHRGIKQVRTHWLLELVTTRGSTGRGLSYNFTHLDGYLDLLRENQLLPGFELMGSASGHFTDFEDKQQVFEWKDLVSSLARRYIGRYGLAHVSKWNFETWNEPDHHDFDNVSMTMQGFLNYYDACSEGLRAASPALRLGGPGDSFHTPPRSPLSWGLLRHCHDGTNFFTGEAGVRLDYISLHRKGARSSISILEQEKVVAQQIRQLFPKFADTPIYNDEADPLVGWSLPQPWRADVTYAAMVVKVIAQHQNLLLANTTSAFPYALLSNDNAFLSYHPHPFAQRTLTARFQVNNTRPPHVQLLRKPVLTAMGLLALLDEEQLWAEVSQAGTVLDSNHTVGVLASAHRPQGPADAWRAAVLIYASDDTRAHPNRSVAVTLRLRGVPPGPGLVYVTRYLDNGLCSPDGEWRRLGRPVFPTAEQFRRMRAAEDPVAAAPRPLPAGGRLTLRPALRLPSLLLVHVCARPEKPPGQVTRLRALPLTQGQLVLVWSDEHVGSKCLWTYEIQFSQDGKAYTPVSRKPSTFNLFVFSPDTGAVSGSYRVRALDYWARPGPFSDPVPYLEVPVPRGPPSPGNP

SEQ ID NO: 142 - protein, 525 aa, Homo sapiens
  REGION 1..525: note = Cytochrome P450 family 4 subfamily V member 2 (CYP4V2)
MAGLWLGLVWQKLLLWGAASALSLAGASLVLSLLQRVASYARKWQQMRPIPTVARAYPLVGHALLMKPDGREFFQQIIEYTEEYRHMPLLKLWVGPVPMVALYNAENVEVILTSSKQIDKSSMYKFLEPWLGLGLLTSTGNKWRSRRKMLTPTFHFTILEDFLDIMNEQANILVKKLEKHINQEAFNCFFYITLCALDIICETAMGKNIGAQSNDDSEYVRAVYRMSEMIFRRIKMPWLWLDLWYLMFKEGWEHKKSLQILHTFTNSVIAERANEMNANEDCRGDGRGSAPSKNKRRAFLDLLLSVTDDEGNRLSHEDIREEVDTFMFEGHDTTAAAINWSLYLLGSNPEVQKKVDHELDDVFGKSDRPATVEDLKKLRYLECVIKETLRLFPSVPLFARSVSEDCEVAGYRVLKGTEAVIIPYALHRDPRYFPNPEEFQPERFFPENAQGRHPYAYVPFSAGPRNCIGQKFAVMEEKTILSCILRHFWIESNQKREELGLEGQLILRPSNGIWIKLKRRNADER

SEQ ID NO: 143 - protein, 224 aa, Homo sapiens
  REGION 1..224: note = Retinoschisin 1 (RS1)
MSRKIEGFLLLLLFGYEATLGLSSTEDEGEDPWYQKACKCDCQGGPNALWSAGATSLDCIPECPYHKPLGFESGEVTPDQITCSNPEQYVGWYSSWTANKARLNSQGFGCAWLSKFQDSSQWLQIDLKEIKVISGILTQGRCDIDEWMTKYSVQYRTDERLNWIYYKDQTGNNRVFYGNSDRTSTVQNLLRPPIISRFIRLIPLGWHVRIAIRMELLECVSKCA

SEQ ID NO: 144 - protein, 854 aa, Homo sapiens
  REGION 1..854: note = Phosphodiesterase 6B (PDE6B)
MSLSEEQARSFLDQNPDFARQYFGKKLSPENVAAACEDGCPPDCDSLRDLCQVEESTALLELVQDMQESINMERVVFKVLRRLCTLLQADRCSLFMYRQRNGVAELATRLFSVQPDSVLEDCLVPPDSEIVFPLDIGVVGHVAQTKKMVNVEDVAECPHFSSFADELTDYKTKNMLATPIMNGKDVVAVIMAVNKLNGPFFTSEDEDVFLKYLNFATLYLKIYHLSYLHNCETRRGQVLLWSANKVFEELTDIERQFHKAFYTVRAYLNCERYSVGLLDMTKEKEFFDVWSVLMGESQPYSGPRTPDGREIVFYKVIDYILHGKEEIKVIPTPSADHWALASGLPSYVAESGFICNIMNASADEMFKFQEGALDDSGWLIKNVLSMPIVNKKEEIVGVATFYNRKDGKPFDEQDEVLMESLTQFLGWSVMNTDTYDKMNKLENRKDIAQDMVLYHVKCDRDEIQLILPTRARLGKEPADCDEDELGEILKEELPGPTTFDIYEFHFSDLECTELDLVKCGIQMYYELGVVRKFQIPQEVLVRFLFSISKGYRRITYHNWRHGFNVAQTMFTLLMTGKLKSYYTDLEAFAMVTAGLCHDIDHRGTNNLYQMKSQNPLAKLHGSSILERHHLEFGKFLLSEETLNIYQNLNRRQHEHVIHLMDIAIIATDLALYFKKRAMFQKIVDESKNYQDKKSWVEYLSLETTRKEIVMAMMMTACDLSAITKPWEVQSKVALLVAAEFWEQGDLERTVLDQQPIPMMDRNKAAELPKLQVGFIDFVCTFVYKEFSRFHEEILPMFDRLQNNRKEWKALADEYEAKVKALEEKEEEERVAAKKVGTEICNGGPAPKSSTCCIL

SEQ ID NO: 145 - protein, 498 aa, Homo sapiens [sequence omitted]

SEQ ID NO: 146 - protein, 743 aa, Homo sapiens
  REGION 1..743: note = N-acetyl-alpha-glucosaminidase (NAGLU)
MEAVAVAAAVGVLLLAGAGGAAGDEAREAAAVRALVARLLGPGPAADFSVSVERALAAKPGLDTYSLGGGGAARVRVRGSTGVAAAAGLHRYLRDFCGCHVAWSGSQLRLPRPLPAVPGELTEATPNRYRYYQNVCTQSYSFVWWDWARWEREIDWMALNGINLALAWSGQEAIWQRVYLALGLTQAEINEFFTGPAFLAWGRMGNLHTWDGPLPPSWHIKQLYLQHRVLDQMRSFGMTPVLPAFAGHVPEAVTRVFPQVNVTKMGSWGHFNCSYSCSFLLAPEDPIFPIIGSLFLRELIKEFGTDHIYGADTFNEMQPPSSEPSYLAAATTAVYEAMTAVDTEAVWLLQGWLFQHQPQFWGPAQIRAVLGAVPRGRLLVLDLFAESQPVYTRTASFQGQPFIWCMLHNFGGNHGLFGALEAVNGGPEAARLFPNSTMVGTGMAPEGISQNEVVYSLMAELGWRKDPVPDLAAWVTSFAARRYGVSHPDAGAAWRLLLRSVYNCSGEACRGHNRSPLVRRPSLQMNTSIWYNRSDVFEAWRLLLTSAPSLATSPAFRYDLLDLTRQAVQELVSLYYEEARSAYLSKELASLLRAGGVLAYELLPALDEVLASDSRFLLGSWLEQARAAAVSEAEADFYEQNSRYQLTLWGPEGNILDYANKQLAGLVANYYTPRWRLFLEALVDSVAQGIPFQQHQFDKNVFQLEQAFVLSKQRYPSQPRGDTVDLAKKIFLKYYPGWVAGSW

SEQ ID NO: 147 - skipped

SEQ ID NO: 148 - protein, 429 aa, Homo sapiens; identical to SEQ ID NO: 11
  REGION 1..429: note = Alpha-Galactosidase A (GLA)

SEQ ID NO: 149 - protein, 458 aa, synthetic construct
  REGION 1..458: note = Codon optimized + GET, CO1-GLA-GET
MQLRNPELHLGCALALRFLALVSWDIPGARALDNGLARTPTMGWLHWERFMCNLDCQEEPDSCISEKLFMEMAELMVSEGWKDAGYEYLCIDDCWMAPQRDSEGRLQADPQRFPHGIRQLANYVHSKGLKLGIYADVGNKTCAGFPGSFGYYDIDAQTFADWGVDLLKFDGCYCDSLENLADGYKHMSLALNRTGRSIVYSCEWPLYMWPFQKPNYTEIRQYCNHWRNFADIDDSWKSIKSILDWTSFNQERIVDVAGPGGWNDPDMLVIGNFGLSWNQQVTQMALWAIMAAPLFMSNDLRHISPQAKALLQDKDVIAINQDPLGKQGYQLRQGDNFEVWERPLSGLAWAVAMINRQEIGGPRSYTIAVASLGKGVACNPACFITQLLPVKRKLGFYEWTSRLRSHINPTGTVLLQLENTMQMSLKDLLRRRRRRRRKRKKKGKGLGKKRDPCLRKYK

SEQ ID NO: 150 - protein, 1428 aa, synthetic construct; identical to SEQ ID NO: 95
  REGION 1..1428: note = Codon optimized, Cystic Fibrosis Transmembrane Regulator deltaR (CFTRdeltaR) contains R domain deletion

SEQ ID NO: 151 - protein, 1480 aa, synthetic construct; identical to SEQ ID NO: 94
  REGION 1..1480: note = Codon optimized, full length Cystic Fibrosis Transmembrane Regulator (CFTR)

SEQ ID NO: 152 - DNA, 250 bp, synthetic construct; identical to SEQ ID NO: 96
  misc_feature 1..250: note = Mouse U1a promoter
  source 1..250: mol_type = other DNA

SEQ ID NO: 153 - DNA, 101 bp, synthetic construct; identical to SEQ ID NO: 97
  misc_feature 1..101: note = Polymerase III H1 mutant promoter
  source 1..101: mol_type = other DNA

SEQ ID NO: 154 - DNA, 659 bp, synthetic construct
  misc_feature 1..659: note = Chicken beta-actin hybrid promoter CBh (CBh promoter consists of CMV enhancer, CBA promoter, first CBA exon and partial intron)
  source 1..659: mol_type = other DNA
cgttacataacttacggtaaatggcccgcctggctgaccgcccaacgacccccgcccattgacgtcaatagtaacgccaatagggactttccattgacgtcaatgggtggagtatttacggtaaactgcccacttggcagtacatcaagtgtatcatatgccaagtacgccccctattgacgtcaatgacggtaaatggcccgcctggcattgtgcccagtacatgaccttatgggactttcctacttggcagtacatctacgtattagtcatcgctattaccatggtcgaggtgagccccacgttctgcttcactctccccatctcccccccctccccacccccaattttgtatttatttattttttaattattttgtgcagcgatgggggcggggggggggggggggcgcgcgccaggcggggcggggcggggcgaggggcggggcggggcgaggcggagaggtgcggcggcagccaatcagagcggcgcgctccgaaagtttccttttatggcgaggcggcggcggcggcggccctataaaaagcgaagcgcgcggcgggcgggagtcgctgcgacgctgccttcgccccgtgccccgctccgccgccgcctcgcgccgcccgccccggctctgactgaccgcgttactcccacag

SEQ ID NO: 155 - DNA, 229 bp, synthetic construct
  misc_feature 1..229: note = MeCP2 min promoter sequence
  source 1..229: mol_type = other DNA
agctgaatggggtccgcctcttttccctgcctaaacagacaggaactcctgccaattgagggcgtcaccgctaaggctccgccccagcctgggctccacaaccaatgaagggtaatctcgacaaagagcaaggggtggggcgcgggcgcgcaggtgcagcagcacacaggctggtcgggagggcggggcgcgacgtctgccgtgcggggtcccggcatcggttgcgcgc

SEQ ID NO: 156 - DNA, 737 bp, synthetic construct
  misc_feature 1..737: note = MeCP2 promoter sequence
  source 1..737: mol_type = other DNA
tcaaaccatctgattcaacaatgcacgaccgatctcttatgggcttggcacacaccatctgcccattataaacgtctgcaaagaccaaggtttgatatgttgattttactgtcagccttaagagtgcgacatctgctaatttagtgtaataatacaatcagtagaccctttaaaacaagtcccttggcttggaacaacgccaggctcctcaacaggcaactttgctacttctacagaaaatgataataaagaaatgctggtgaagtcaaatgcttatcacaatggtgaactactcagcagggaggctctaataggcgccaagagcctagacttccttaagcgccagagtccacaagggcccagttaatcctcaacattcaaatgctgcccacaaaaccagcccctctgtgccctagccgcctcttttttccaagtgacagtagaactccaccaatccgcagctgaatggggtccgcctcttttccctgcctaaacagacaggaactcctgccaattgagggcgtcaccgctaaggctccgccccagcctgggctccacaaccaatgaagggtaatctcgacaaagagcaaggggtggggcgcgggcgcgcaggtgcagcagcacacaggctggtcgggagggcggggcgcgacgtctgccgtgcggggtcccggcatcggttgcgcgcgcgctccctcctctcggagagagggctgtggtaaaacccgtccggaaaa

SEQ ID NO: 157 - DNA, 418 bp, synthetic construct
  misc_feature 1..418: note = MeCP418 promoter sequence
  source 1..418: mol_type = other DNA
ataggcgccaagagcctagacttccttaagcgccagagtccacaagggcccagttaatcctcaacattcaaatgctgcccacaaaaccagcccctctgtgccctagccgcctcttttttccaagtgacagtagaactccaccaatccgcagctgaatggggtccgcctcttttccctgcctaaacagacaggaactcctgccaattgagggcgtcaccgctaaggctccgccccagcctgggctccacaaccaatgaagggtaatctcgacaaagagcaaggggtggggcgcgggcgcgcaggtgcagcagcacacaggctggtcgggagggcggggcgcgacgtctgccgtgcggggtcccggcatcggttgcgcgcgcgctccctcctctcggagagagggctgtggtaaaacccg

SEQ ID NO: 158 - DNA, 426 bp, synthetic construct
  misc_feature 1..426: note = MeCP426 promoter sequence
  source 1..426: mol_type = other DNA
ataggcgccaagagcctagacttccttaagcgccagagtccacaagggcccagttaatcctcaacattcaaatgctgcccacaaaaccagcccctctgtgccctagccgcctcttttttccaagtgacagtagaactccaccaatccgcagctgaatggggtccgcctcttttccctgcctaaacagacaggaactcctgccaattgagggcgtcaccgctaaggctccgccccagcctgggctccacaaccaatgaagggtaatctcgacaaagagcaaggggtggggcgcgggcgcgcaggtgcagcagcacacaggctggtcgggagggcggggcgcgacgtctgccgtgcggggtcccggcatcggttgcgcgcgcgctccctcctctcggagagagggctgtggtaaaacccgtccggaaa

SEQ ID NO: 159 - DNA, 400 bp, synthetic construct
  misc_feature 1..400: note = VMD2 promoter
  source 1..400: mol_type = other DNA
aattctgtcattttactagggtgatgaaattcccaagcaacaccatccttttcagataagggcactgaggctgagagaggagctgaaacctacccggggtcaccacacacaggtggcaaggctgggaccagaaaccaggactgttgactctggattttagggccatggtagagggggtgttgccctaaattccagccctggtctcagcccaacaccctccaagaagaaattagaggggccatggccaggctgtgctagccgttgcttctgagcagattacaagaagggactaagacaaggactcctttgtggaggtcctggcttagggagtcaagtgacggcggctcagcactcacgtgggcagtgccagcctctaagagtgggcaggggcactggccac

SEQ ID NO: 160 - DNA, 136 bp, synthetic construct
  misc_feature 1..136: note = PDE6b promoter
  source 1..136: mol_type = other DNA
cccatttgtaggagtgagtcagctgacccgcccccggggttcctaatctcactaagaaagactttgctgatgacagggtttcctgggagtccatgcgtgcctggagcagcagcgtctccagggacaggcagccacc

SEQ ID NO: 161 - DNA, 2035 bp, synthetic construct
  misc_feature 1..2035: note = mRho promoter
  source 1..2035: mol_type = other DNA
gcgccaatcagccgatgacttctaacaatactcttaactcacacagagcttgtctcactgagccaacaccctgtaccctcagctcagtgacggctttcaacctgtggggctgcctctgttacccaagtgagagagggccagtgctcccagaggtgaccttgtttgcccattctctccctgggtcagccagtgtttatctgttgtatacccagtccaccctgcaggctcacatcagagcctaggagatggctagtgtccccgcggagaccacgatgaagcttcccagctgtctcaagcacaagctggctgcagaggctgctgaggcactgctagctggggatgggggcagggtagatctggggctgaccaccagggtcagaatcagaacctccaccttgacctcattaacgctggtcttaatcaccaagccaagctccttaaactgctagtggccaactcccaggccctgacacacatacctgccctgtgttcccaaacaagacacctgcatggaaggaagggggttgcttttctaagcaaacatctaggaatcccgggtgcagtgtgaggagactaggcgagggagtactttaagggcctcaaggctcagagaggaatacttcttccctggttagcctcgtgcctaggctccagggtctttgtcctgcctggatacctatgtggcaaggggcatagcatttcccccaccatcagctcttagctcaaccttatcttctcggaaagactgcgcagtgtaacaacacagcagagacttttcttttgtcccctgtctacccctgtaactgctactcagaagcatctttctcacagggtactggcttcttgcatccagagttttttgtctccctcgggcccccagaatcaaattcttcctctgggactcagtggatgtttcacacacgtatcggcctgacagtcatcctggagcatcctacacaggggccatcacagctgcatgtcagaaatgctggcctcacatcctcagacaccaggcctagtgctggtcttcctcagactggcgtccccagcaggccagtaggatcatcttttagcctacagagttctgaagcctcagagccccaggtccctggtcatcttctctgcccctgagatttttccaagttgtatgccttctaggtaaggcaaaacttcttacgcccctcctcgtggcctccaggccccacatgctcacctgaataacctggcagcctgctccctcatgcagggaccacgtcctgctgcacccagcaggccatcccgtctccatagcccatggtcatccctccctggacaggaatgtgtctcctccccgggctgagtcttgctcaagctagaagcactccgaacagggttatgggcgcctcctccatctcccaagtggctggcttatgaatgtttaatgtacatgtgagtgaacaaattccaattgaacgcaacaaatagttatcgagccgctgagccggggggcggggggtgtgagactggaggcgatggacggagctgacggcacacacagctcagatctgtcaagtgagccattgtcagggcttggggactggataagtcagggggtctcctgggaagagatgggataggtgagttcaggaggagacattgtcaactggagccatgtggagaagtgaatttagggcccaaaggttccagtcgcagcctgaggccaccagactgacatggggaggaattcccagaggactctggggcagacaagatgagacaccctttcctttctttacctaagggcctccacccgatgtcaccttggcccctctgcaagccaattaggccccggtggcagcagtgggattagcgttagtatgatatctcgcggatgctgaatcagcctctggcttagggagagaaggtcactttataagggtctggggggggtcagtgcctggagttgcgctgtgggagccgtcagtggctgagctcgccaagcagccttggtctctgtctacgaagagcccgtggggcagcctcgagagccgcagcc

SEQ ID NO: 162 - DNA, 511 bp, synthetic construct
  misc_feature 1..511: note = CMV promoter
  source 1..511: mol_type = other DNA
ccgttacataacttacggtaaatggcccgcctggctgaccgcccaacgacccccgcccattgacgtcaatagtaacgccaatagggactttccattgacgtcaatgggtggagtatttacggtaaactgcccacttggcagtacatcaagtgtatcatatgccaagtacgccccctattgacgtcaatgacggtaaatggcccgcctggcattgtgcccagtacatgaccttatgggactttcctacttggcagtacatctacgtattagtcatcgctattaccatggtgatgcggttttggcagtacatcaatgggcgtggatagcggtttgactcacggggatttccaagtctccaccccattgacgtcaatgggagtttgttttggcaccaaaatcaacgggactttccaaaatgtcgtaacaactccgccccattgacgcaaatgggcggtaggcgtgtacggtgggaggtctatataagcagagctcgtttagtgaaccgtcagat

SEQ ID NO: 163 - DNA, 334 bp, synthetic construct
  misc_feature 1..334: note = UbC promoter
  source 1..334: mol_type = other DNA
ggcctccgcgccgggttttggcgcctcccgcgggcgcccccctcctcacggcgagcgctgccacgtcagacgaagggcgcagcgagcgtcctgatccttccgcccggacgctcaggacagcggcccgctgctcataagactcggccttagaaccccagtatcagcagaaggacattttaggacgggacttgggtgactctagggcactggttttctttccagagagcggaacaggcgaggaaaagtagtcccttctcggcgattctgcggagggatctccgtggggcggtgaacgccgatgattatataaggacgcgccgggtgtggcacagct

SEQ ID NO: 164 - protein, 737 aa, synthetic construct
  REGION 1..737: note = AAV 214-D5 VP1 capsid protein
MAADGYLPDWLEDNLSEGIREWWALKPGAPKPKANQQKQDDGRGLVLPGYKYLGPFNGLDKGEPVNAADAAALEHDKAYDQQLKAGDNPYLRYNHADAEFQERLQEDTSFGGNLGRAVFQAKKRVLEPFGLVEEGAKTAPGKKRPVEQSPQEPDSSSGIGKTGQQPAKKRLNFGQTGDSESVPDPQPLGEPPATPAAVGPTTMASGGGAPMADNNEGADGVGNASGNWHCDSTWLGDRVITTSTRTWALPTYNNHLYKQISNGTSGGSTNDNTYFGYSTPWGYFDFNRFHCHFSPRDWQRLINNNWGFRPKRLNFKLFNIQVKEVTDNNGVKTIANNLTSTVQVFTDSDYQLPYVLGSAHQGCLPPFPADVFMIPQYGYLTLNDGSQAVGRSSFYCLEYFPSQMLRTGNNFTFSYTFEDVPFHSSYAHSQSLDRLMNPLIDQYLYYLSKTQSTGGTAGTQQLLFSQAGPNTMANQAKNWLPGPCYRQQRVSTTTGQNNNSNFAWTAGTKYHLNGRNSLMNPGPAMASHKEGEDRFFPLSGSLIFGKQNAARDNADYSDVMLTSEEEIKTTNPVATEEYGIVADNLQQQNTAPQIGTVNSQGALPGMVWQNRDVYLQGPIWAKIPHTDGNFHPSPLMGGFGLKHPPPQILIKNTPVPADPPTTFNQSKLNSFITQYSTGQVSVEIEWELQKENSKRWNPEIQYTSNYYKSTSVDFAVNTEGVYSEPHPIGTRYLTRPL

SEQ ID NO: 165 - protein, 600 aa, synthetic construct
  REGION 1..600: note = AAV214-D5 VP2 capsid protein
MAPGKKRPVEQSPQEPDSSSGIGKTGQQPAKKRLNFGQTGDSESVPDPQPLGEPPATPAAVGPTTMASGGGAPMADNNEGADGVGNASGNWHCDSTWLGDRVITTSTRTWALPTYNNHLYKQISNGTSGGSTNDNTYFGYSTPWGYFDFNRFHCHFSPRDWQRLINNNWGFRPKRLNFKLFNIQVKEVTDNNGVKTIANNLTSTVQVFTDSDYQLPYVLGSAHQGCLPPFPADVFMIPQYGYLTLNDGSQAVGRSSFYCLEYFPSQMLRTGNNFTFSYTFEDVPFHSSYAHSQSLDRLMNPLIDQYLYYLSKTQSTGGTAGTQQLLFSQAGPNTMANQAKNWLPGPCYRQQRVSTTTGQNNNSNFAWTAGTKYHLNGRNSLMNPGPAMASHKEGEDRFFPLSGSLIFGKQNAARDNADYSDVMLTSEEEIKTTNPVATEEYGIVADNLQQQNTAPQIGTVNSQGALPGMVWQNRDVYLQGPIWAKIPHTDGNFHPSPLMGGFGLKHPPPQILIKNTPVPADPPTTFNQSKLNSFITQYSTGQVSVEIEWELQKENSKRWNPEIQYTSNYYKSTSVDFAVNTEGVYSEPHPIGTRYLTRPL

SEQ ID NO: 166 - protein, 535 aa, synthetic construct
  REGION 1..535: note = AAV214-D5 VP3 capsid protein
MASGGGAPMADNNEGADGVGNASGNWHCDSTWLGDRVITTSTRTWALPTYNNHLYKQISNGTSGGSTNDNTYFGYSTPWGYFDFNRFHCHFSPRDWQRLINNNWGFRPKRLNFKLFNIQVKEVTDNNGVKTIANNLTSTVQVFTDSDYQLPYVLGSAHQGCLPPFPADVFMIPQYGYLTLNDGSQAVGRSSFYCLEYFPSQMLRTGNNFTFSYTFEDVPFHSSYAHSQSLDRLMNPLIDQYLYYLSKTQSTGGTAGTQQLLFSQAGPNTMANQAKNWLPGPCYRQQRVSTTTGQNNNSNFAWTAGTKYHLNGRNSLMNPGPAMASHKEGEDRFFPLSGSLIFGKQNAARDNADYSDVMLTSEEEIKTTNPVATEEYGIVADNLQQQNTAPQIGTVNSQGALPGMVWQNRDVYLQGPIWAKIPHTDGNFHPSPLMGGFGLKHPPPQILIKNTPVPADPPTTFNQSKLNSFITQYSTGQVSVEIEWELQKENSKRWNPEIQYTSNYYKSTSVDFAVNTEGVYSEPHPIGTRYLTRPL

SEQ ID NO: 167 - DNA, 2214 bp, synthetic construct
  misc_feature 1..2214: note = AAV214-D5 VP1 capsid protein coding sequence
  source 1..2214: mol_type = other DNA
atggctgccgatggttatcttccagattggctcgaggacaacctctctgagggcattcgcgagtggtgggcgctgaaacctggagccccgaagcccaaagccaaccagcaaaagcaggacgacggccggggtctggtgcttcctggctacaagtacctcggacccttcaacggactcgacaagggggagcccgtcaacgcggcggacgcagcggccctcgagcacgacaaggcctacgaccagcagctcaaagcgggtgacaatccgtacctgcggtataaccacgccgacgccgagtttcaggagcgtctgcaagaagatacgtcttttgggggcaacctcgggcgagcagtcttccaggccaagaagcgggttctcgaaccttttggtctggttgaggaaggtgctaagacggctcctggaaagaaacgtccggtagagcagtcgccacaagagccagactcctcctcgggcatcggcaagacaggccagcagcccgctaaaaagagactcaattttggtcagactggcgactcagagtcagtccccgacccacaacctctcggagaacctccagcaacccccgctgctgtgggacctactacaatggcttcaggcggtggcgcaccaatggcggacaataacgaaggcgccgacggagtgggtaatgcctcaggaaattggcattgcgattccacatggctgggcgacagagtcatcaccaccagcacccgcacctgggccttgcccacctacaataaccacctctacaagcaaatctccaacgggacttcgggaggaagcaccaacgacaacacctacttcggctacagcaccccctgggggtattttgacttcaacagattccactgccacttttcaccacgtgactggcaaagactcatcaacaacaactggggattccgacccaagagactcaacttcaagctctttaacattcaagtcaaagaggttacggacaacaatggagtcaagaccatcgccaataaccttaccagcacggtccaggtcttcacggactcagactatcagctcccgtacgtcctcggctctgcgcaccagggctgcctccctccgttcccggcggacgtgttcatgattccgcagtacggctacctaacgctcaacgacggcagccaggcagtgggacggtcatccttttactgcctggaatatttcccatcgcagatgctgagaacgggcaacaactttaccttcagctacacctttgaggacgttcctttccacagcagctacgctcacagccagagtctggaccgtctcatgaatcctctgattgaccagtacctgtactacttgtctaagactcagtccacgggaggtaccgcaggaactcagcagttgctattttctcaggccgggcctaatacaatggccaatcaggcaaagaactggctgccaggaccctgttaccgccaacaacgcgtctcaacgacaaccgggcaaaacaacaatagcaactttgcctggactgctgggaccaaataccatctgaatggaagaaattcattgatgaatcctggccccgctatggcatcccacaaagagggcgaggaccgtttttttcccctgtccgggtccctgatttttggcaaacaaaatgctgccagagacaatgcggattacagcgatgtcatgctcaccagcgaggaagaaatcaaaaccactaaccctgtggctacagaggaatacggtatcgtggcagataacttgcagcagcaaaacacggctcctcaaattggaactgtcaacagccagggggccttacccggtatggtctggcagaaccgggacgtgtacctgcagggtcccatctgggccaagattcctcacacggacggcaacttccacccgtctccgctgatgggcggctttggcctgaaacatcctccgcctcagatcctgatcaagaacacgcctgtacctgcggatcctccgaccaccttcaaccagtcaaagctgaactctttcatcacgcaatacagcaccggacaggtcagcgtggaaattgaatgggagctgcagaaggaaaacagcaagcgctggaaccccgagatccagtacacctccaactactacaaatctacaagtgtggactttgctgttaatacagaaggcgtgtactctgaaccccaccccattggcacccgttacctcacccgtcccctgtaa

SEQ ID NO: 168 - DNA, 1803 bp, synthetic construct
  misc_feature 1..1803: note = AAV214-D5 VP2 capsid protein coding sequence
  source 1..1803: mol_type = other DNA
atggctcctggaaagaaacgtccggtagagcagtcgccacaagagccagactcctcctcgggcatcggcaagacaggccagcagcccgctaaaaagagactcaattttggtcagactggcgactcagagtcagtccccgacccacaacctctcggagaacctccagcaacccccgctgctgtgggacctactacaatggcttcaggcggtggcgcaccaatggcggacaataacgaaggcgccgacggagtgggtaatgcctcaggaaattggcattgcgattccacatggctgggcgacagagtcatcaccaccagcacccgcacctgggccttgcccacctacaataaccacctctacaagcaaatctccaacgggacttcgggaggaagcaccaacgacaacacctacttcggctacagcaccccctgggggtattttgacttcaacagattccactgccacttttcaccacgtgactggcaaagactcatcaacaacaactggggattccgacccaagagactcaacttcaagctctttaacattcaagtcaaagaggttacggacaacaatggagtcaagaccatcgccaataaccttaccagcacggtccaggtcttcacggactcagactatcagctcccgtacgtcctcggctctgcgcaccagggctgcctccctccgttcccggcggacgtgttcatgattccgcagtacggctacctaacgctcaacgacggcagccaggcagtgggacggtcatccttttactgcctggaatatttcccatcgcagatgctgagaacgggcaacaactttaccttcagctacacctttgaggacgttcctttccacagcagctacgctcacagccagagtctggaccgtctcatgaatcctctgattgaccagtacctgtactacttgtctaagactcagtccacgggaggtaccgcaggaactcagcagttgctattttctcaggccgggcctaatacaatggccaatcaggcaaagaactggctgccaggaccctgttaccgccaacaacgcgtctcaacgacaaccgggcaaaacaacaatagcaactttgcctggactgctgggaccaaataccatctgaatggaagaaattcattgatgaatcctggccccgctatggcatcccacaaagagggcgaggaccgtttttttcccctgtccgggtccctgatttttggcaaacaaaatgctgccagagacaatgcggattacagcgatgtcatgctcaccagcgaggaagaaatcaaaaccactaaccctgtggctacagaggaatacggtatcgtggcagataacttgcagcagcaaaacacggctcctcaaattggaactgtcaacagccagggggccttacccggtatggtctggcagaaccgggacgtgtacctgcagggtcccatctgggccaagattcctcacacggacggcaacttccacccgtctccgctgatgggcggctttggcctgaaacatcctccgcctcagatcctgatcaagaacacgcctgtacctgcggatcctccgaccaccttcaaccagtcaaagctgaactctttcatcacgcaatacagcaccggacaggtcagcgtggaaattgaatgggagctgcagaaggaaaacagcaagcgctggaaccccgagatccagtacacctccaactactacaaatctacaagtgtggactttgctgttaatacagaaggcgtgtactctgaaccccaccccattggcacccgttacctcacccgtcccctgtaa

SEQ ID NO: 169 - DNA, 1608 bp, synthetic construct
  misc_feature 1..1608: note = AAV214-D5 VP3 capsid protein coding sequence
  source 1..1608: mol_type = other DNA
atggcttcaggcggtggcgcaccaatggcggacaataacgaaggcgccgacggagtgggtaatgcctcaggaaattggcattgcgattccacatggctgggcgacagagtcatcaccaccagcacccgcacctgggccttgcccacctacaataaccacctctacaagcaaatctccaacgggacttcgggaggaagcaccaacgacaacacctacttcggctacagcaccccctgggggtattttgacttcaacagattccactgccacttttcaccacgtgactggcaaagactcatcaacaacaactggggattccgacccaagagactcaacttcaagctctttaacattcaagtcaaagaggttacggacaacaatggagtcaagaccatcgccaataaccttaccagcacggtccaggtcttcacggactcagactatcagctcccgtacgtcctcggctctgcgcaccagggctgcctccctccgttcccggcggacgtgttcatgattccgcagtacggctacctaacgctcaacgacggcagccaggcagtgggacggtcatccttttactgcctggaatatttcccatcgcagatgctgagaacgggcaacaactttaccttcagctacacctttgaggacgttcctttccacagcagctacgctcacagccagagtctggaccgtctcatgaatcctctgattgaccagtacctgtactacttgtctaagactcagtccacgggaggtaccgcaggaactcagcagttgctattttctcaggccgggcctaatacaatggccaatcaggcaaagaactggctgccaggaccctgttaccgccaacaacgcgtctcaacgacaaccgggcaaaacaacaatagcaactttgcctggactgctgggaccaaataccatctgaatggaagaaattcattgatgaatcctggccccgctatggcatcccacaaagagggcgaggaccgtttttttcccctgtccgggtccctgatttttggcaaacaaaatgctgccagagacaatgcggattacagcgatgtcatgctcaccagcgaggaagaaatcaaaaccactaaccctgtggctacagaggaatacggtatcgtggcagataacttgcagcagcaaaacacggctcctcaaattggaactgtcaacagccagggggccttacccggtatggtctggcagaaccgggacgtgtacctgcagggtcccatctgggccaagattcctcacacggacggcaacttccacccgtctccgctgatgggcggctttggcctgaaacatcctccgcctcagatcctgatcaagaacacgcctgtacctgcggatcctccgaccaccttcaaccagtcaaagctgaactctttcatcacgcaatacagcaccggacaggtcagcgtggaaattgaatgggagctgcagaaggaaaacagcaagcgctggaaccccgagatccagtacacctccaactactacaaatctacaagtgtggactttgctgttaatacagaaggcgtgtactctgaaccccaccccattggcacccgttacctcacccgtcccctgtaa

SEQ ID NO: 170 - protein, 8 aa, synthetic construct
  REGION 1..8: note = VR-I
NGTSGGST

SEQ ID NO: 171 - protein, 11 aa, synthetic construct
  REGION 1..11: note = VR-IV
QSTGGTAGTQQ

SEQ ID NO: 172 - DNA, 6822 bp, Homo sapiens
  source 1..6822: mol_type = genomic DNA
atgggcttcgtgagacagatacagcttttgctctggaagaactggaccctgcggaaaaggcaaaagattcgctttgtggtggaactcgtgtggcctttatctttatttctggtcttgatctggttaaggaatgccaacccactctacagccatcatgaatgccatttccccaacaaggcgatgccctcagcaggaatgctgccgtggctccaggggatcttctgcaatgtgaacaatccctgttttcaaagccccaccccaggagaatctcctggaattgtgtcaaactataacaactccatcttggcaagggtatatcgagattttcaagaactcctcatgaatgcaccagagagccagcaccttggccgtatttggacagagctacacatcttgtcccaattcatggacaccctccggactcacccggagagaattgcaggaagaggaatacgaataagggatatcttgaaagatgaagaaacactgacactatttctcattaaaaacatcggcctgtctgactcagtggtctaccttctgatcaactctcaagtccgtccagagcagttcgctcatggagtcccggacctggcgctgaaggacatcgcctgcagcgaggccctcctggagcgcttcatcatcttcagccagagacgcggggcaaagacggtgcgctatgccctgtgctccctctcccagggcaccctacagtggatagaagacactctgtatgccaacgtggacttcttcaagctcttccgtgtgcttcccacactcctagacagccgttctcaaggtatcaatctgagatcttggggaggaatattatctgatatgtcaccaagaattcaagagtttatccatcggccgagtatgcaggacttgctgtgggtgaccaggcccctcatgcagaatggtggtccagagacctttacaaagctgatgggcatcctgtctgacctcctgtgtggctaccccgagggaggtggctctcgggtgctctccttcaactggtatgaagacaataactataaggcctttctggggattgactccacaaggaaggatcctatctattcttatgacagaagaacaacatccttttgtaatgcattgatccagagcctggagtcaaatcctttaaccaaaatcgcttggagggcggcaaagcctttgctgatgggaaaaatcctgtacactcctgattcacctgcagcacgaaggatactgaagaatgccaactcaacttttgaagaactggaacacgttaggaagttggtcaaagcctgggaagaagtagggccccagatctggtacttctttgacaacagcacacagatgaacatgatcagagataccctggggaacccaacagtaaaagactttttgaataggcagcttggtgaagaaggtattactgctgaagccatcctaaacttcctctacaagggccctcgggaaagccaggctgacgacatggccaacttcgactggagggacatatttaacatcactgatcgcaccctccgcctggtcaatcaatacctggagtgcttggtcctggataagtttgaaagctacaatgatgaaactcagctcacccaacgtgccctctctctactggaggaaaacatgttctgggccggagtggtattccctgacatgtatccctggaccagctctctaccaccccacgtgaagtataagatccgaatggacatagacgtggtggagaaaaccaataagattaaagacaggtattgggattctggtcccagagctgatcccgtggaagatttccggtacatctggggcgggtttgcctatctgcaggacatggttgaacaggggatcacaaggagccaggtgcaggcggaggctccagttggaatctacctccagcagatgccctacccctgcttcgtggacgattctttcatgatcatcctgaaccgctgtttccctatcttcatggtgctggcatggatctactctgtctccatgactgtgaagagcatcgtcttggagaaggagttgcgactgaaggagaccttgaaaaatcagggtgtctccaatgcagtgatttggtgtacctggttcctggacagcttctccatcatgtcgatgagcatcttcctcctgacgatattcatcatgcatggaagaatcctacattacagcgacccattcatcctcttcctgttcttgttggctttctccactgccaccatcatgctgtgctttctgctcagcaccttcttctccaaggccagtctggcagcagcctgtagtggtgtcatctatttcaccctctacctgccacacatcctgtgcttcgcctggcaggaccgcatgaccgctgagctgaagaaggctgtgagcttactgtctccggtggcatttggatttggcactgagtacctggttcgctttgaagagcaaggcctggggctgcagtggagcaacatcgggaacagtcccacggaaggggacgaattcagcttcctgctgtccatgcagatgatgctccttgatgctgctgtctatggcttactcgcttggtaccttgatcaggtgtttccaggagactatggaaccccacttccttggtactttcttctacaagagtcgtattggcttggcggtgaagggtgttcaaccagagaagaaagagccctggaaaagaccgagcccctaacagaggaaacggaggatccagagcacccagaaggaatacacgactccttctttgaacgtgagcatccagggtgggttcctggggtatgcgtgaagaatctggtaaagatttttgagccctgtggccggccagctgtggaccgtctgaacatcaccttctacgagaaccagatcaccgcattcctgggccacaatggagctgggaaaaccaccaccttgtccatcctgacgggtctgttgccaccaacctctgggactgtgctcgttgggggaagggacattgaaaccagcctggatgcagtccggcagagccttggcatgtgtccacagcacaacatcctgttccaccacctcacggtggctgagcacatgctgttctatgcccagctgaaaggaaagtcccaggaggaggcccagctggagatggaagccatgttggaggacacaggcctccaccacaagcggaatgaagaggctcaggacctatcaggtggcatgcagagaaagctgtcggttgccattgcctttgtgggagatgccaaggtggtgattctggacgaacccacctctggggtggacccttactcgagacgctcaatctgggatctgctcctgaagtatcgctcaggcagaaccatcatcatgtccactcaccacatggacgaggccgacctccttggggaccgcattgccatcattgcccagggaaggctctactgctcaggcaccccactcttcctgaagaactgctttggcacaggcttgtacttaaccttggtgcgcaagatgaaaaacatccagagccaaaggaaaggcagtgaggggacctgcagctgctcgtctaagggtttctccaccacgtgtccagcccacgtcgatgacctaactccagaacaagtcctggatggggatgtaaatgagctgatggatgtagttctccaccatgttccagaggcaaagctggtggagtgcattggtcaagaacttatcttccttcttccaaataagaacttcaagcacagagcatatgccagccttttcagagagctggaggagacgctggctgaccttggtctcagcagttttggaatttctgacactcccctggaagagatttttctgaaggtcacggaggattctgattcaggacctctgtttgcgggtggcgctcagcagaaaagagaaaacgtcaacccccgacacccctgcttgggtcccagagagaaggctggacagacaccccaggactccaatgtctgctccccaggggcgccggctgctcacccagagggccagcctcccccagagccagagtgcccaggcccgcagctcaacacggggacacagctggtcctccagcatgtgcaggcgctgctggtcaagagattccaacacaccatccgcagccacaaggacttcctggcgcagatcgtgctcccggctacctttgtgtttttggctctgatgctttctattgttatccctccttttggcgaataccccgctttgacccttcacccctggatatatgggcagcagtacaccttcttcagcatggatgaaccaggcagtgagcagttcacggtacttgcagacgtcctcctgaataagccaggctttggcaaccgctgcctgaaggaagggtggcttccggagtacccctgtggcaactcaacaccctggaagactccttctgtgtccccaaacatcacccagctgttccagaagcagaaatggacacaggtcaacccttcaccatcctgcaggtgcagcaccagggagaagctcaccatgctgccagagtgccccgagggtgccgggggcctcccgcccccccagagaacacagcgcagcacggaaattctacaagacctgacggacaggaacatctccgacttcttggtaaaaacgtatcctgctcttataagaagcagcttaaagagcaaattctgggtcaatgaacagaggtatggaggaatttccattggaggaaagctcccagtcgtccccatcacgggggaagcacttgttgggtttttaagcgaccttggccggatcatgaatgtgagcgggggccctatcactagagaggcctctaaagaaatacctgatttccttaaacatctagaaactgaagacaacattaaggtgtggtttaataacaaaggctggcatgccctggtcagctttctcaatgtggcccacaacgccatcttacgggccagcctgcctaaggacaggagccccgaggagtatggaatcaccgtcattagccaacccctgaacctgaccaaggagcagctctcagagattacagtgctgaccacttcagtggatgctgtggttgccatctgcgtgattttctccatgtccttcgtcccagccagctttgtcctttatttgatccaggagcgggtgaacaaatccaagcacctccagtttatcagtggagtgagccccaccacctactgggtgaccaacttcctctgggacatcatgaattattccgtgagtgctgggctggtggtgggcatcttcatcgggtttcagaagaaagcctacacttctccagaaaaccttcctgcccttgtggcactgctcctgctgtatggatgggcggtcattcccatgatgtacccagcatccttcctgtttgatgtccccagcacagcctatgtggctttatcttgtgctaatctgttcatcggcatcaacagcagtgctattaccttcatcttggaattatttgagaataaccggacgctgctcaggttcaacgccgtgctgaggaagctgctcattgtcttcccccacttctgcctgggccggggcctcattgaccttgcactgagccaggctgtgacagatgtctatgcccggtttggtgaggagcactctgcaaatccgttccactgggacctgattgggaagaacctgtttgccatggtggtggaaggggtggtgtacttcctcctgaccctgctggtccagcgccacttcttcctctcccaatggattgccgagcccactaaggagcccattgttgatgaagatgatgatgtggctgaagaaagacaaagaattattactggtggaaataaaactgacatcttaaggctacatgaactaaccaagatttatccaggcacctccagcccagcagtggacaggctgtgtgtcggagttcgccctggagagtgctttggcctcctgggagtgaatggtgccggcaaaacaaccacattcaagatgctcactggggacaccacagtgacctcaggggatgccaccgtagcaggcaagagtattttaaccaatatttctgaagtccatcaaaatatgggctactgtcctcagtttgatgcaattgatgagctgctcacaggacgagaacatctttacctttatgcccggcttcgaggtgtaccagcagaagaaatcgaaaaggttgcaaactggagtattaagagcctgggcctgactgtctacgccgactgcctggctggcacgtacagtgggggcaacaagcggaaactctccacagccatcgcactcattggctgcccaccgctggtgctgctggatgagcccaccacagggatggacccccaggcacgccgcatgctgtggaacgtcatcgtgagcatcatcagagaagggagggctgtggtcctcacatcccacagcatggaagaatgtgaggcactgtgtacccggctggccatcatggtaaagggcgcctttcgatgtatgggcaccattcagcatctcaagtccaaatttggagatggctatatcgtcacaatgaagatcaaatccccgaaggacgacctgcttcctgacctgaaccctgtggagcagttcttccaggggaacttcccaggcagtgtgcagagggagaggcactacaacatgctccagttccaggtctcctcctcctccctggcgaggatcttccagctcctcctctcccacaaggacagcctgctcatcgaggagtactcagtcacacagaccacactggaccaggtgtttgtaaattttgctaaacagcagactgaaagtcatgacctccctctgcaccctcgagctgctggagccagtcgacaagcccaggactga

SEQ ID NO: 173 - DNA, 1758 bp, Homo sapiens
  source 1..1758: mol_type = genomic DNA
atgaccatcacttacacaagccaagtggctaatgcccgcttaggctccttctcccgcctgctgctgtgctggcggggcagcatctacaagctgctatatggcgagttcttaatcttcctgctctgctactacatcatccgctttatttataggctggccctcacggaagaacaacagctgatgtttgagaaactgactctgtattgcgacagctacatccagctcatccccatttccttcgtgctgggcttctacgtgacgctggtcgtgacccgctggtggaaccagtacgagaacctgccgtggcccgaccgcctcatgagcctggtgtcgggcttcgtcgaaggcaaggacgagcaaggccggctgctgcggcgcacgctcatccgctacgccaacctgggcaacgtgctcatcctgcgcagcgtcagcaccgcagtctacaagcgcttccccagcgcccagcacctggtgcaagcaggctttatgactccggcagaacacaagcagttggagaaactgagcctaccacacaacatgttctgggtgccctgggtgtggtttgccaacctgtcaatgaaggcgtggcttggaggtcgaatccgggaccctatcctgctccagagcctgctgaacgagatgaacaccttgcgtactcagtgtggacacctgtatgcctacgactggattagtatcccactggtgtatacacaggtggtgactgtggcggtgtacagcttcttcctgacttgtctagttgggcggcagtttctgaacccagccaaggcctaccctggccatgagctggacctcgttgtgcccgtcttcacgttcctgcagttcttcttctatgttggctggctgaaggtggcagagcagctcatcaacccctttggagaggatgatgatgattttgagaccaactggattgtcgacaggaatttgcaggtgtccctgttggctgtggatgagatgcaccaggacctgcctcggatggagccggacatgtactggaataagcccgagccacagcccccctacacagctgcttccgcccagttccgtcgagcctcctttatgggctccaccttcaacatcagcctgaacaaagaggagatggagttccagcccaatcaggaggacgaggaggatgctcacgctggcatcattggccgcttcctaggcctgcagtcccatgatcaccatcctcccagggcaaactcaaggaccaaactactgtggcccaagagggaatcccttctccacgagggcctgcccaaaaaccacaaggcagccaaacagaacgttaggggccaggaagacaacaaggcctggaagcttaaggctgtggacgccttcaagtctgccccactgtatcagaggccaggctactacagtgccccacagacgcccctcagccccactcccatgttcttccccctagaaccatcagcgccgtcaaagcttcacagtgtcacaggcatagacaccaaagacaaaagcttaaagactgtgagttctggggccaagaaaagttttgaattgctctcagagagcgatggggccttgatggagcacccagaagtatctcaagtgaggaggaaaactgtggagtttaacctgacggatatgccagagatccccgaaaatcacctcaaagaacctttggaacaatcaccaaccaacatacacactacactcaaagatcacatggatccttattgggccttggaaaacagggatgaagcacattcctaa

SEQ ID NO: 174 - DNA, 1815 bp, Homo sapiens
  source 1..1815: mol_type = genomic DNA
atgtttgagaaactgactctgtattgcgacagctacatccagctcatccccatttccttcgtgctgggcttctacgtgacgctggtcgtgacccgctggtggaaccagtacgagaacctgccgtggcccgaccgcctcatgagcctggtgtcgggcttcgtcgaaggcaaggacgagcaaggccggctgctgcggcgcacgctcatccgctacgccaacctgggcaacgtgctcatcctgcgcagcgtcagcaccgcagtctacaagcgcttccccagcgcccagcacctggtgcaagcaggctttatgactccggcagaacacaagcagttggagaaactgagcctaccacacaacatgttctgggtgccctgggtgtggtttgccaacctgtcaatgaaggcgtggcttggaggtcgaatccgggaccctatcctgctccagagcctgctgaacgagatgaacaccttgcgtactcagtgtggacacctgtatgcctacgactggattagtatcccactggtgtatacacaggtggtgactgtggcggtgtacagcttcttcctgacttgtctagttgggcggcagtttctgaacccagccaaggcctaccctggccatgagctggacctcgttgtgcccgtcttcacgttcctgcagttcttcttctatgttggctggctgaaggtggcagagcagctcatcaacccctttggagaggatgatgatgattttgagaccaactggattgtcgacaggaatttgcaggtgtccctgttggctgtggatgagatgcaccaggacctgcctcggatggagccggacatgtactggaataagcccgagccacagcccccctacacagctgcttccgcccagttccgtcgagcctcctttatgggctccaccttcaacatcagcctgaacaaagaggagatggagttccagcccaatcaggaggacgaggaggatgctcacgctggcatcattggccgcttcctaggcctgcagtcccatgatcaccatcctcccagggcaaactcaaggaccaaactactgtggcccaagagggaatcccttctccacgagggcctgcccaaaaaccacaaggcagccaaacagaacgttaggggccaggaagacaacaaggcctggaagcttaaggctgtggacgccttcaagtctgccccactgtatcagaggccaggctactacagtgccccacagacgcccctcagccccactcccatgttcttccccctagaaccatcagcgccgtcaaagcttcacagtgtcacaggcatagacaccaaagacaaaagcttaaagactgtgagttctggggccaagaaaagttttgaattgctctcagagagcgatggggccttgatggagcacccagaagtatctcaagtgaggaggaaaactgtggagtttaacctgacggatatgccagagatccccgaaaatcacctcaaagaacctttggaacaatcaccaaccaacatacacactacactcaaagatcacatggatccttattgggccttggaaaacaggtctgtcctccacctgaaccaggggcactgcattgccctgtgccccaccccagcttcccttgctctgagcctacccttcctccacaatttcctagggttccatcactgccagagcacactggacctacgcccagcactggcttggggtatatacttggccaccttcacagggatcctagggaagtgttcgggaccttttctcacttcaccctggtatcacccggaagacttcttgggaccaggtgaaggaagatga

SEQ ID NO: 175 - DNA, 2883 bp, Homo sapiens
  source 1..2883: mol_type = genomic DNA
atgtggcgactacgtcgggccgctgtggcctgtgaggtctgccagtctttagtgaaacacagctctggaataaaaggaagtttaccactacaaaaactacatctggtttcacgaagcatttatcattcacatcatcctaccttaaagcttcaacgaccccaattaaggacatcctttcagcagttctcttctctgacaaaccttcctttacgtaaactgaaattctctccaattaaatatggctaccagcctcgcaggaatttttggccagcaagattagctacgagactcttaaaacttcgctatctcatactaggatcggctgttgggggtggctacacagccaaaaagacttttgatcagtggaaagatatgataccggaccttagtgaatataaatggattgtgcctgacattgtgtgggaaattgatgagtatatcgattttgagaaaattagaaaagcccttcctagttcagaagaccttgtaaagttagcaccagactttgacaagattgttgaaagccttagcttattgaaggacttttttacctcaggttctccggaagaaacggcgtttagagcaacagatcgtggatctgaaagtgacaagcattttagaaaggtgtcagacaaagagaaaattgaccaacttcaggaagaacttctgcacactcagttgaagtatcagagaatcttggaacgattagaaaaggagaacaaagaattgagaaaattagtattgcagaaagatgacaaaggcattcatcatagaaagcttaagaaatctttgattgacatgtattctgaagttcttgatgttctctctgattatgatgccagttataatacgcaagatcatctgccacgggttgttgtggttggagatcagagtgctggaaagactagtgtgttggaaatgattgcccaagctcgaatattcccaagaggatctggggagatgatgacacgttctccagttaaggtgactctgagtgaaggtcctcaccatgtggccctatttaaagatagttctcgggagtttgatcttaccaaagaagaagatcttgcagcattaagacatgaaatagaacttcgaatgaggaaaaatgtgaaagaaggctgtaccgttagccctgagaccatatccttaaatgtaaaaggccctggactacagaggatggtgcttgttgacttaccaggtgtgattaatactgtgacatcaggcatggctcctgacacaaaggaaactattttcagtatcagcaaagcttacatgcagaatcctaatgccatcatactgtgtattcaagatggatctgtggatgctgaacgcagtattgttacagacttggtcagtcaaatggaccctcatggaaggagaaccatattcgttttgaccaaagtagacctggcagagaaaaatgtagccagtccaagcaggattcagcagataattgaaggaaagctcttcccaatgaaagctttaggttattttgctgttgtaacaggaaaagggaacagctctgaaagcattgaagctataagagaatatgaagaagagttttttcagaattcaaagctcctaaagacaagcatgctaaaggcacaccaagtgactacaagaaatttaagccttgcagtatcagactgcttttggaaaatggtacgagagtctgttgaacaacaggctgatagtttcaaagcaacacgttttaaccttgaaactgaatggaagaataactatcctcgcctgcgggaacttgaccggaatgaactatttgaaaaagctaaaaatgaaatccttgatgaagttatcagtctgagccaggttacaccaaaacattgggaggaaatccttcaacaatctttgtgggaaagagtatcaactcatgtgattgaaaacatctaccttccagctgcgcagaccatgaattcaggaacttttaacaccacagtggatatcaagcttaaacagtggactgataaacaacttcctaataaagcagtagaggttgcttgggagaccctacaagaagaattttcccgctttatgacagaaccgaaagggaaagagcatgatgacatatttgataaacttaaagaggctgttaaggaagaaagtattaaacgacacaagtggaatgactttgcggaggacagcttgagggttattcaacacaatgctttggaagaccgatccatatctgataaacagcaatgggatgcagctatttattttatggaagaggctctgcaggctcgtctcaaggatactgaaaatgcaattgaaaacatggtgggtccagactggaaaaagaggtggttatactggaagaatcggacccaagaacagtgtgttcacaatgaaaccaagaatgaattggagaagatgttgaaatgtaatgaggagcacccagcttatcttgcaagtgatgaaataaccacagtccggaagaaccttgaatcccgaggagtagaagtagatccaagcttgattaaggatacttggcatcaagtttatagaagacattttttaaaaacagctctaaaccattgtaacctttgtcgaagaggtttttattactaccaaaggcattttgtagattctgagttggaatgcaatgatgtggtcttgttttggcgtatacagcgcatgcttgctatcaccgcaaatactttaaggcaacaacttacaaatactgaagttaggcgattagagaaaaatgttaaagaggtattggaagattttgctgaagatggtgagaagaagattaaattgcttactggtaaacgcgttcaactggcggaagacctcaagaaagttagagaaattcaagaaaaacttgatgctttcattgaagctcttcatcaggagaaataa

SEQ ID NO: 176 - DNA, 381 bp, Homo sapiens
  source 1..381: mol_type = genomic DNA
atgcggaccaagatgcgcatcatgggcttccggggcacggtcatcaagccgctgaacgaggaggcggcagctgagctgggcgcagagctgctgggcgaagccaccatcttcatcgtgggcggcggctgcctagtgctggagtactggcgccaccaggcgcagcagcgccacaaggaggaggagcagcgtgctgcctggaacgcgctgcgggacgaggtgggccacctggcgctggcgctggaagcgctgcaggcgcaggtgcaggcggcgccgccacagggcgccctggaggaactgcgcacagagctgcaagaggtgcgcgcccagctctgcaatcccggccggtccgcttcccacgcagtgcctgcgtccaagaaatag

SEQ ID NO: 177 - protein, 2273 aa, Homo sapiens [sequence omitted]

SEQ ID NO: 178 - protein, 585 aa, Homo sapiens
MTITYTSQVANARLGSFSRLLLCWRGSIYKLLYGEFLIFLLCYYIIRFIYRLALTEEQQLMFEKLTLYCDSYIQLIPISFVLGFYVTLVVTRWWNQYENLPWPDRLMSLVSGFVEGKDEQGRLLRRTLIRYANLGNVLILRSVSTAVYKRFPSAQHLVQAGFMTPAEHKQLEKLSLPHNMFWVPWVWFANLSMKAWLGGRIRDPILLQSLLNEMNTLRTQCGHLYAYDWISIPLVYTQVVTVAVYSFFLTCLVGRQFLNPAKAYPGHELDLVVPVFTFLQFFFYVGWLKVAEQLINPFGEDDDDFETNWIVDRNLQVSLLAVDEMHQDLPRMEPDMYWNKPEPQPPYTAASAQFRRASFMGSTFNISLNKEEMEFQPNQEDEEDAHAGIIGRFLGLQSHDHHPPRANSRTKLLWPKRESLLHEGLPKNHKAAKQNVRGQEDNKAWKLKAVDAFKSAPLYQRPGYYSAPQTPLSPTPMFFPLEPSAPSKLHSVTGIDTKDKSLKTVSSGAKKSFELLSESDGALMEHPEVSQVRRKTVEFNLTDMPEIPENHLKEPLEQSPTNIHTTLKDHMDPYWALENRDEAHS

SEQ ID NO: 179 - protein, 604 aa, Homo sapiens
MFEKLTLYCDSYIQLIPISFVLGFYVTLVVTRWWNQYENLPWPDRLMSLVSGFVEGKDEQGRLLRRTLIRYANLGNVLILRSVSTAVYKRFPSAQHLVQAGFMTPAEHKQLEKLSLPHNMFWVPWVWFANLSMKAWLGGRIRDPILLQSLLNEMNTLRTQCGHLYAYDWISIPLVYTQVVTVAVYSFFLTCLVGRQFLNPAKAYPGHELDLVVPVFTFLQFFFYVGWLKVAEQLINPFGEDDDDFETNWIVDRNLQVSLLAVDEMHQDLPRMEPDMYWNKPEPQPPYTAASAQFRRASFMGSTFNISLNKEEMEFQPNQEDEEDAHAGIIGRFLGLQSHDHHPPRANSRTKLLWPKRESLLHEGLPKNHKAAKQNVRGQEDNKAWKLKAVDAFKSAPLYQRPGYYSAPQTPLSPTPMFFPLEPSAPSKLHSVTGIDTKDKSLKTVSSGAKKSFELLSESDGALMEHPEVSQVRRKTVEFNLTDMPEIPENHLKEPLEQSPTNIHTTLKDHMDPYWALENRSVLHLNQGHCIALCPTPASLALSLPFLHNFLGFHHCQSTLDLRPALAWGIYLATFTGILGKCSGPFLTSPWYHPEDFLGPGEGR

SEQ ID NO: 180 - protein, 960 aa, Homo sapiens
MWRLRRAAVACEVCQSLVKHSSGIKGSLPLQKLHLVSRSIYHSHHPTLKLQRPQLRTSFQQFSSLTNLPLRKLKFSPIKYGYQPRRNFWPARLATRLLKLRYLILGSAVGGGYTAKKTFDQWKDMIPDLSEYKWIVPDIVWEIDEYIDFEKIRKALPSSEDLVKLAPDFDKIVESLSLLKDFFTSGSPEETAFRATDRGSESDKHFRKVSDKEKIDQLQEELLHTQLKYQRILERLEKENKELRKLVLQKDDKGIHHRKLKKSLIDMYSEVLDVLSDYDASYNTQDHLPRVVVVGDQSAGKTSVLEMIAQARIFPRGSGEMMTRSPVKVTLSEGPHHVALFKDSSREFDLTKEEDLAALRHEIELRMRKNVKEGCTVSPETISLNVKGPGLQRMVLVDLPGVINTVTSGMAPDTKETIFSISKAYMQNPNAIILCIQDGSVDAERSIVTDLVSQMDPHGRRTIFVLTKVDLAEKNVASPSRIQQIIEGKLFPMKALGYFAVVTGKGNSSESIEAIREYEEEFFQNSKLLKTSMLKAHQVTTRNLSLAVSDCFWKMVRESVEQQADSFKATRFNLETEWKNNYPRLRELDRNELFEKAKNEILDEVISLSQVTPKHWEEILQQSLWERVSTHVIENIYLPAAQTMNSGTFNTTVDIKLKQWTDKQLPNKAVEVAWETLQEEFSRFMTEPKGKEHDDIFDKLKEAVKEESIKRHKWNDFAEDSLRVIQHNALEDRSISDKQQWDAAIYFMEEALQARLKDTENAIENMVGPDWKKRWLYWKNRTQEQCVHNETKNELEKMLKCNEEHPAYLASDEITTVRKNLESRGVEVDPSLIKDTWHQVYRRHFLKTALNHCNLCRRGFYYYQRHFVDSELECNDVVLFWRIQRMLAITANTLRQQLTNTEVRRLEKNVKEVLEDFAEDGEKKIKLLTGKRVQLAEDLKKVREIQEKLDAFIEALHQEK

SEQ ID NO: 181 - protein, 126 aa, Homo sapiens
MRTKMRIMGFRGTVIKPLNEEAAAELGAELLGEATIFIVGGGCLVLEYWRHQAQQRHKEEEQRAAWNALRDEVGHLALALEALQAQVQAAPPQGALEELRTELQEVRAQLCNPGRSASHAVPASKK

SEQ ID NO: 182 - DNA, 2850 bp, Homo sapiens
  source 1..2850: mol_type = genomic DNA
atgtggcgactacgtcgggccgctgtggcctgtgaggtctgccagtctttagtgaaacacagctctggaataaaaggaagtttaccactacaaaaactacatctggtttcacgaagcatttatcattcacatcatcctaccttaaagcttcaacgaccccaattaaggacatcctttcagcagttctcttctctgacaaaccttcctttacgtaaactgaaattctctccaattaaatatggctaccagcctcgcaggaatttttggccagcaagattagctacgagactcttaaaacttcgctatctcatactaggatcggctgttgggggtggctacacagccaaaaagacttttgatcagtggaaagatatgataccggaccttagtgaatataaatggattgtgcctgacattgtgtgggaaattgatgagtatatcgattttgagaaaattagaaaagcccttcctagttcagaagaccttgtaaagttagcaccagactttgacaagattgttgaaagccttagcttattgaaggacttttttacctcaggttctccggaagaaagtgacaagcattttagaaaggtgtcagacaaagagaaaattgaccaacttcaggaagaacttctgcacactcagttgaagtatcagagaatcttggaacgattagaaaaggagaacaaagaattgagaaaattagtattgcagaaagatgacaaaggcattcatcatagaaagcttaagaaatctttgattgacatgtattctgaagttcttgatgttctctctgattatgatgccagttataatacgcaagatcatctgccacgggttgttgtggttggagatcagagtgctggaaagactagtgtgttggaaatgattgcccaagctcgaatattcccaagaggatctggggagatgatgacacgttctccagttaaggtgactctgagtgaaggtcctcaccatgtggccctatttaaagatagttctcgggagtttgatcttaccaaagaagaggatcttgcagcattaagacatgaaatagaacttcgaatgaggaaaaatgtgaaagaaggctgtaccgttagccctgagaccatatccttaaatgtaaaaggccctggactacagaggatggtgcttgttgacttaccaggtgtgattaatactgtgacatcaggcatggctcctgacacaaaggaaactattttcagtatcagcaaagcttacatgcagaatcctaatgccatcatactgtgtattcaagatggatctgtggatgctgaacgcagtattgttacagacttggtcagtcaaatggaccctcatggaaggagaaccatattcgttttgaccaaagtagacctggcagagaaaaatgtagccagtccaagcaggattcagcagataattgaaggaaagctcttcccaatgaaagctttaggttattttgctgttgtaacaggaaaagggaacagctctgaaagcattgaagctataagagaatatgaagaagagttttttcagaattcaaagctcctaaagacaagcatgctaaaggcacaccaagtgactacaagaaatttaagccttgcagtatcagactgcttttggaaaatggtacgagagtctgttgaacaacaggctgatagtttcaaagcaacacgttttaaccttgaaactgaatggaagaataactatcctcgcctgcgggaacttgaccggaatgaactatttgaaaaagctaaaaatgaaatccttgatgaagttatcagtctgagccaggttacaccaaaacattgggaggaaatccttcaacaatctttgtgggaaagagtatcaactcatgtgattgaaaacatctaccttccagctgcgcagaccatgaattcaggaacttttaacaccacagtggatatcaagcttaaacagtggactgataaacaacttcctaataaagcagtagaggttgcttgggagaccctacaagaagaattttcccgctttatgacagaaccgaaagggaaagagcatgatgacatatttgataaacttaaagaggctgttaaggaagaaagtattaaacgacacaagtggaatgactttgcggaggacagcttgagggttattcaacacaatgctttggaagaccgatccatatctgataaacagcaatgggatgcagctatttattttatggaagaggctctgcaggctcgtctcaaggatactgaaaatgcaattgaaaacatggtgggtccagactggaaaaagaggtggttatactggaagaatcggacccaagaacagtgtgttcacaatgaaaccaagaatgaattggagaagatgttgaaatgtaatgaggagcacccagcttatcttgcaagtgatgaaataaccacagtccggaagaaccttgaatcccgaggagtagaagtagatccaagcttgattaaggatacttggcatcaagtttatagaagacattttttaaaaacagctctaaaccattgtaacctttgtcgaagaggtttttattactaccaaaggcattttgtagattctgagttggaatgcaatgatgtggtcttgttttggcgtatacagcgcatgcttgctatcaccgcaaatactttaaggcaacaacttacaaatactgaagttaggcgattagagaaaaatgttaaagaggtattggaagattttgctgaagatggtgagaagaagattaaattgcttactggtaagcgcgttcaactggcggaagacctcaagaaagttagagaaattcaagaaaaacttgatgctttcattgaagctcttcatcaggagaaataa

SEQ ID NO: 183 - protein, 949 aa, Homo sapiens
MWRLRRAAVACEVCQSLVKHSSGIKGSLPLQKLHLVSRSIYHSHHPTLKLQRPQLRTSFQQFSSLTNLPLRKLKFSPIKYGYQPRRNFWPARLATRLLKLRYLILGSAVGGGYTAKKTFDQWKDMIPDLSEYKWIVPDIVWEIDEYIDFEKIRKALPSSEDLVKLAPDFDKIVESLSLLKDFFTSGSPEESDKHFRKVSDKEKIDQLQEELLHTQLKYQRILERLEKENKELRKLVLQKDDKGIHHRKLKKSLIDMYSEVLDVLSDYDASYNTQDHLPRVVVVGDQSAGKTSVLEMIAQARIFPRGSGEMMTRSPVKVTLSEGPHHVALFKDSSREFDLTKEEDLAALRHEIELRMRKNVKEGCTVSPETISLNVKGPGLQRMVLVDLPGVINTVTSGMAPDTKETIFSISKAYMQNPNAIILCIQDGSVDAERSIVTDLVSQMDPHGRRTIFVLTKVDLAEKNVASPSRIQQIIEGKLFPMKALGYFAVVTGKGNSSESIEAIREYEEEFFQNSKLLKTSMLKAHQVTTRNLSLAVSDCFWKMVRESVEQQADSFKATRFNLETEWKNNYPRLRELDRNELFEKAKNEILDEVISLSQVTPKHWEEILQQSLWERVSTHVIENIYLPAAQTMNSGTFNTTVDIKLKQWTDKQLPNKAVEVAWETLQEEFSRFMTEPKGKEHDDIFDKLKEAVKEESIKRHKWNDFAEDSLRVIQHNALEDRSISDKQQWDAAIYFMEEALQARLKDTENAIENMVGPDWKKRWLYWKNRTQEQCVHNETKNELEKMLKCNEEHPAYLASDEITTVRKNLESRGVEVDPSLIKDTWHQVYRRHFLKTALNHCNLCRRGFYYYQRHFVDSELECNDVVLFWRIQRMLAITANTLRQQLTNTEVRRLEKNVKEVLEDFAEDGEKKIKLLTGKRVQLAEDLKKVREIQEKLDAFIEALHQEK

SEQ ID NO: 184 - DNA, 2994 bp, Homo sapiens
  source 1..2994: mol_type = genomic DNA
atgtggcgactacgtcgggccgctgtggcctgtgaggtctgccagtctttagtgaaacacagctctggaataaaaggaagtttaccactacaaaaactacatctggtttcacgaagcatttatcattcacatcatcctaccttaaagcttcaacgaccccaattaaggacatcctttcagcagttctcttctctgacaaaccttcctttacgtaaactgaaattctctccaattaaatatggctaccagcctcgcaggaatttttggccagcaagattagctacgagactcttaaaacttcgctatctcatactaggatcggctgttgggggtggctacacagccaaaaagacttttgatcagtggaaagatatgataccggaccttagtgaatataaatggattgtgcctgacattgtgtgggaaattgatgagtatatcgattttgagaaaattagaaaagcccttcctagttcagaagaccttgtaaagttagcaccagactttgacaagattgttgaaagccttagcttattgaaggacttttttacctcaggttctccggaagaaacggcgtttagagcaacagatcgtggatctgaaagtgacaagcattttagaaagggtctgcttggtgagctcattctcttacaacaacaaattcaagagcatgaagaggaagcgcgcagagccgctggccaatatagcacgagctatgcccaacagaagcgcaaggtgtcagacaaagagaaaattgaccaacttcaggaagaacttctgcacactcagttgaagtatcagagaatcttggaacgattagaaaaggagaacaaagaattgagaaaattagtattgcagaaagatgacaaaggcattcatcatagaaagcttaagaaatctttgattgacatgtattctgaagttcttgatgttctctctgattatgatgccagttataatacgcaagatcatctgccacgggttgttgtggttggagatcagagtgctggaaagactagtgtgttggaaatgattgcccaagctcgaatattcccaagaggatctggggagatgatgacacgttctccagttaaggtgactctgagtgaaggtcctcaccatgtggccctatttaaagatagttctcgggagtttgatcttaccaaagaagaggatcttgcagcattaagacatgaaatagaacttcgaatgaggaaaaatgtgaaagaaggctgtaccgttagccctgagaccatatccttaaatgtaaaaggccctggactacagaggatggtgcttgttgacttaccaggtgtgattaatactgtgacatcaggcatggctcctgacacaaaggaaactattttcagtatcagcaaagcttacatgcagaatcctaatgccatcatactgtgtattcaagatggatctgtggatgctgaacgcagtattgttacagacttggtcagtcaaatggaccctcatggaaggagaaccatattcgttttgaccaaagtagacctggcagagaaaaatgtagccagtccaagcaggattcagcagataattgaaggaaagctcttcccaatgaaagctttaggttattttgctgttgtaacaggaaaagggaacagctctgaaagcattgaagctataagagaatatgaagaagagttttttcagaattcaaagctcctaaagacaagcatgctaaaggcacaccaagtgactacaagaaatttaagccttgcagtatcagactgcttttggaaaatggtacgagagtctgttgaacaacaggctgatagtttcaaagcaacacgttttaaccttgaaactgaatggaagaataactatcctcgcctgcgggaacttgaccggaatgaactatttgaaaaagctaaaaatgaaatccttgatgaagttatcagtctgagccaggttacaccaaaacattgggaggaaatccttcaacaatctttgtgggaaagagtatcaactcatgtgattgaaaacatctaccttccagctgcgcagaccatgaattcaggaacttttaacaccacagtggatatcaagcttaaacagtggactgataaacaacttcctaataaagcagtagaggttgcttgggagaccctacaagaagaattttcccgctttatgacagaaccgaaagggaaagagcatgatgacatatttgataaacttaaagaggctgttaaggaagaaagtattaaacgacacaagtggaatgactttgcggaggacagcttgagggttattcaacacaatgctttggaagaccgatccatatctgataaacagcaatgggatgcagctatttattttatggaagaggctctgcaggctcgtctcaaggatactgaaaatgcaattgaaaacatggtgggtccagactggaaaaagaggtggttatactggaagaatcggacccaagaacagtgtgttcacaatgaaaccaagaatgaattggagaagatgttgaaatgtaatgaggagcacccagcttatcttgcaagtgatgaaataaccacagtccggaagaaccttgaatcccgaggagtagaagtagatccaagcttgattaaggatacttggcatcaagtttatagaagacattttttaaaaacagctctaaaccattgtaacctttgtcgaagaggtttttattactaccaaaggcattttgtagattctgagttggaatgcaatgatgtggtcttgttttggcgtatacagcgcatgcttgctatcaccgcaaatactttaaggcaacaacttacaaatactgaagttaggcgattagagaaaaatgttaaagaggtattggaagattttgctgaagatggtgagaagaagattaaattgcttactggtaagcgcgttcaactggcggaagacctcaagaaagttagagaaattcaagaaaaacttgatgctttcattgaagctcttcatcaggagaaataa

SEQ ID NO: 185 - protein, 997 aa, Homo sapiens
MWRLRRAAVACEVCQSLVKHSSGIKGSLPLQKLHLVSRSIYHSHHPTLKLQRPQLRTSFQQFSSLTNLPLRKLKFSPIKYGYQPRRNFWPARLATRLLKLRYLILGSAVGGGYTAKKTFDQWKDMIPDLSEYKWIVPDIVWEIDEYIDFEKIRKALPSSEDLVKLAPDFDKIVESLSLLKDFFTSGSPEETAFRATDRGSESDKHFRKGLLGELILLQQQIQEHEEEARRAAGQYSTSYAQQKRKVSDKEKIDQLQEELLHTQLKYQRILERLEKENKELRKLVLQKDDKGIHHRKLKKSLIDMYSEVLDVLSDYDASYNTQDHLPRVVVVGDQSAGKTSVLEMIAQARIFPRGSGEMMTRSPVKVTLSEGPHHVALFKDSSREFDLTKEEDLAALRHEIELRMRKNVKEGCTVSPETISLNVKGPGLQRMVLVDLPGVINTVTSGMAPDTKETIFSISKAYMQNPNAIILCIQDGSVDAERSIVTDLVSQMDPHGRRTIFVLTKVDLAEKNVASPSRIQQIIEGKLFPMKALGYFAVVTGKGNSSESIEAIREYEEEFFQNSKLLKTSMLKAHQVTTRNLSLAVSDCFWKMVRESVEQQADSFKATRFNLETEWKNNYPRLRELDRNELFEKAKNEILDEVISLSQVTPKHWEEILQQSLWERVSTHVIENIYLPAAQTMNSGTFNTTVDIKLKQWTDKQLPNKAVEVAWETLQEEFSRFMTEPKGKEHDDIFDKLKEAVKEESIKRHKWNDFAEDSLRVIQHNALEDRSISDKQQWDAAIYFMEEALQARLKDTENAIENMVGPDWKKRWLYWKNRTQEQCVHNETKNELEKMLKCNEEHPAYLASDEITTVRKNLESRGVEVDPSLIKDTWHQVYRRHFLKTALNHCNLCRRGFYYYQRHFVDSELECNDVVLFWRIQRMLAITANTLRQQLTNTEVRRLEKNVKEVLEDFAEDGEKKIKLLTGKRVQLAEDLKKVREIQEKLDAFIEALHQEK

SEQ ID NO: 186 - DNA, 6088 bp, synthetic construct
  source 1..6088: mol_type = other DNA
tcctgcaggcagctgcgcgctcgctcgctcactgaggccgcccgggcaaagcccgggcgtcgggcgacctttggtcgcccggcctcagtgagcgagcgagcgcgcagagagggagtggccaactccatcactaggggttcctgcggccgcacgcgtggtacccgttacataacttacggtaaatggcccgcctggctgaccgcccaacgacccccgcccattgacgtcaatagtaacgccaatagggactttccattgacgtcaatgggtggagtatttacggtaaactgcccacttggcagtacatcaagtgtatcatatgccaagtacgccccctattgacgtcaatgacggtaaatggcccgcctggcattgtgcccagtacatgaccttatgggactttcctacttggcagtacatctacgtattagtcatcgctattaccatggtcgaggtgagccccacgttctgcttcactctccccatctcccccccctccccacccccaattttgtatttatttattttttaattattttgtgcagcgatgggggcggggggggggggggggcgcgcgccaggcggggcggggcggggcgaggggcggggcggggcgaggcggagaggtgcggcggcagccaatcagagcggcgcgctccgaaagtttccttttatggcgaggcggcggcggcggcggccctataaaaagcgaagcgcgcggcgggcgggagtcgctgcgacgctgccttcgccccgtgccccgctccgccgccgcctcgcgccgcccgccccggctctgactgaccgcgttactcccacaggtgagcgggcgggacggcccttctcctccgggctgtaattagctgagctttaagggaaggttggttggtggggtattaatctttaattacctggagcacctgcctgaaatcactttttttcaggttggaccggtccaccatgtggcgactacgtcgggccgctgtggcctgtgaggtctgccagtctttagtgaaacacagctctggaataaaaggaagtttaccactacaaaaactacatctggtttcacgaagcatttatcattcacatcatcctaccttaaagcttcaacgaccccaattaaggacatcctttcagcagttctcttctctgacaaaccttcctttacgtaaactgaaattctctccaattaaatatggctaccagcctcgcaggaatttttggccagcaagattagctacgagactcttaaaacttcgctatctcatactaggatcggctgttgggggtggctacacagccaaaaagacttttgatcagtggaaagatatgataccggaccttagtgaatataaatggattgtgcctgacattgtgtgggaaattgatgagtatatcgattttgagaaaattagaaaagcccttcctagttcagaagaccttgtaaagttagcaccagactttgacaagattgttgaaagccttagcttattgaaggacttttttacctcaggttctccggaagaaacggcgtttagagcaacagatcgtggatctgaaagtgacaagcattttagaaaggtgtcagacaaagagaaaattgaccaacttcaggaagaacttctgcacactcagttgaagtatcagagaatcttggaacgattagaaaaggagaacaaagaattgagaaaattagtattgcagaaagatgacaaaggcattcatcatagaaagcttaagaaatctttgattgacatgtattctgaagttcttgatgttctctctgattatgatgccagttataatacgcaagatcatctgccacgggttgttgtggttggagatcagagtgctggaaagactagtgtgttggaaatgattgcccaagctcgaatattcccaagaggatctggggagatgatgacacgttctccagttaaggtgactctgagtgaaggtcctcaccatgtggccctatttaaagatagttctcgggagtttgatcttaccaaagaagaggatcttgcagcattaagacatgaaatagaacttcgaatgaggaaaaatgtgaaagaaggctgtaccgttagccctgagaccatatccttaaatgtaaaaggccctggactacagaggatggtgcttgttgacttaccaggtgtgattaatactgtgacatcaggcatggctcctgacacaaaggaaactattttcagtatcagcaaagcttacatgcagaatcctaatgccatcatactgtgtattcaagatggatctgtggatgctgaacgcagtattgttacagacttggtcagtcaaatggaccctcatggaaggagaaccatattcgttttgaccaaagtagacctggcagagaaaaatgtagccagtccaagcaggattcagcagataattgaaggaaagctcttcccaatgaaagctttaggttattttgctgttgtaacaggaaaagggaacagctctgaaagcattgaagctataagagaatatgaagaagagttttttcagaattcaaagctcctaaagacaagcatgctaaaggcacaccaagtgactacaagaaatttaagccttgcagtatcagactgcttttggaaaatggtacgagagtctgttgaacaacaggctgatagtttcaaagcaacacgttttaaccttgaaactgaatggaagaataactatcctcgcctgcgggaacttgaccggaatgaactatttgaaaaagctaaaaatgaaatccttgatgaagttatcagtctgagccaggttacaccaaaacattgggaggaaatccttcaacaatctttgtgggaaagagtatcaactcatgtgattgaaaacatctaccttccagctgcgcagaccatgaattcaggaacttttaacaccacagtggatatcaagcttaaacagtggactgataaacaacttcctaataaagcagtagaggttgcttgggagaccctacaagaagaattttcccgctttatgacagaaccgaaagggaaagagcatgatgacatatttgataaacttaaagaggctgttaaggaagaaagtattaaacgacacaagtggaatgactttgcggaggacagcttgagggttattcaacacaatgctttggaagaccgatccatatctgataaacagcaatgggatgcagctatttattttatggaagaggctctgcaggctcgtctcaaggatactgaaaatgcaattgaaaacatggtgggtccagactggaaaaagaggtggttatactggaagaatcggacccaagaacagtgtgttcacaatgaaaccaagaatgaattggagaagatgttgaaatgtaatgaggagcacccagcttatcttgcaagtgatgaaataaccacagtccggaagaaccttgaatcccgaggagtagaagtagatccaagcttgattaaggatacttggcatcaagtttatagaagacattttttaaaaacagctctaaaccattgtaacctttgtcgaagaggtttttattactaccaaaggcattttgtagattctgagttggaatgcaatgatgtggtcttgttttggcgtatacagcgcatgcttgctatcaccgcaaatactttaaggcaacaacttacaaatactgaagttaggcgattagagaaaaatgttaaagaggtattggaagattttgctgaagatggtgagaagaagattaaattgcttactggtaagcgcgttcaactggcggaagacctcaagaaagttagagaaattcaagaaaaacttgatgctttcattgaagctcttcatcaggagaaataatctagaggcgcgcctgtgccttctagttgccagccatctgttgtttgcccctcccccgtgccttccttgaccctggaaggtgccactcccactgtcctttcctaataaaatgaggaaattgcatcgcattgtctgagtaggtgtcattctattctggggggtggggtggggcaggacagcaagggggaggattgggaagacaatagcaggcatgctggggatgcggtgggctctatggcctaggagatctgaggaacccctagtgatggagttggccactccctctctgcgcgctcgctcgctcactgaggccgggcgaccaaaggtcgcccgacgcccgggctttgcccgggcggcctcagtgagcgagcgagcgcgcagagagggagtggccaattaattaaggcgatgaacggtaatcgtaaaactagcatgtcaatcatatgtaccccggttgataatcagaaaagccccaaaaacaggaagattgtataagcattaattaatttaaatacatggacatgtcagaattggttaattggttgtaacactgacccctatttgtttatttttctaaatacattcaaatatgtatccgctcatgagacaataaccctgataaatgcttcaataatattgaaaaaggaagaatatgagccatattcaacgggaaacgtcgaggccgcgattaaattccaacatggatgctgatttatatgggtataaatgggctcgcgataatgtcgggcaatcaggtgcgacaatctatcgcttgtatgggaagcccgatgcgccagagttgtttctgaaacatggcaaaggtagcgttgccaatgatgttacagatgagatggtcagactaaactggctgacggaatttatgccacttccgaccatcaagcattttatccgtactcctgatgatgcatggttactcaccactgcgatccccggaaaaacagcgttccaggtattagaagaatatcctgattcaggtgaaaatattgttgatgcgctggcagtgttcctgcgccggttgcactcgattcctgtttgtaattgtccttttaacagcgatcgcgtatttcgcctcgctcaggcgcaatcacgaatgaataacggtttggttgatgcgagtgattttgatgacgagcgtaatggctggcctgttgaacaagtctggaaagaaatgcataaacttttgccattctcaccggattcagtcgtcactcatggtgatttctcacttgataaccttatttttgacgaggggaaattaataggttgtattgatgttggacgagtcggaatcgcagaccgataccaggatcttgccatcctatggaactgcctcggtgagttttctccttcattacagaaacggctttttcaaaaatatggtattgataatcctgatatgaataaattgcagtttcatttgatgctcgatgagtttttctaaaagcagagcattacgctgacttgacgggacggcgcaagctcatgaccaaaatcccttaacgtgagttacgcgcgcgtcgttccactgagcgtcagaccccgtagaaaagatcaaaggatcttcttgagatcctttttttctgcgcgtaatctgctgcttgcaaacaaaaaaaccaccgctaccagcggtggtttgtttgccggatcaagagctaccaactctttttccgaaggtaactggcttcagcagagcgcagataccaaatactgttcttctagtgtagccgtagttagcccaccacttcaagaactctgtagcaccgcctacatacctcgctctgctaatcctgttaccagtggctgctgccagtggcgataagtcgtgtcttaccgggttggactcaagacgatagttaccggataaggcgcagcggtcgggctgaacggggggttcgtgcacacagcccagcttggagcgaacgacctacaccgaactgagatacctacagcgtgagctatgagaaagcgccacgcttcccgaagggagaaaggcggacaggtatccggtaagcggcagggtcggaacaggagagcgcacgagggagcttccagggggaaacgcctggtatctttatagtcctgtcgggtttcgccacctctgacttgagcgtcgatttttgtgatgctcgtcaggggggcggagcctatggaaaaacgccagcaacgcggcctttttacggttcctggccttttgctggccttttgctcacatgtttaaaccatg

SEQ ID NO: 187 - DNA, 6260 bp, synthetic construct
  source 1..6260: mol_type = other DNA
tcctgcaggcagctgcgcgctcgctcgctcactgaggccgcccgggcaaagcccgggcgtcgggcgacctttggtcgcccggcctcagtgagcgagcgagcgcgcagagagggagtggccaactccatcactaggggttcctgcggccgcacgcgtggtacccgttacataacttacggtaaatggcccgcctggctgaccgcccaacgacccccgcccattgacgtcaatagtaacgccaatagggactttccattgacgtcaatgggtggagtatttacggtaaactgcccacttggcagtacatcaagtgtatcatatgccaagtacgccccctattgacgtcaatgacggtaaatggcccgcctggcattgtgcccagtacatgaccttatgggactttcctacttggcagtacatctacgtattagtcatcgctattaccatggtcgaggtgagccccacgttctgcttcactctccccatctcccccccctccccacccccaattttgtatttatttattttttaattattttgtgcagcgatgggggcggggggggggggggggcgcgcgccaggcggggcggggcggggcgaggggcggggcggggcgaggcggagaggtgcggcggcagccaatcagagcggcgcgctccgaaagtttccttttatggcgaggcggcggcggcggcggccctataaaaagcgaagcgcgcggcgggcgggagtcgctgcgacgctgccttcgccccgtgccccgctccgccgccgcctcgcgccgcccgccccggctctgactgaccgcgttactcccacaggtgagcgggcgggacggcccttctcctccgggctgtaattagctgagctttaagggaaggttggttggtggggtattaatctttaattacctggagcacctgcctgaaatcactttttttcaggttggaccggtccaccatgtggcgactacgtcgggccgctgtggcctgtgaggtctgccagtctttagtgaaacacagctctggaataaaaggaagtttaccactacaaaaactacatctggtttcacgaagcatttatcattcacatcatcctaccttaaagcttcaacgaccccaattaaggacatcctttcagcagttctcttctctgacaaaccttcctttacgtaaactgaaattctctccaattaaatatggctaccagcctcgcaggaatttttggccagcaagattagctacgagactcttaaaacttcgctatctcatactaggatcggctgttgggggtggctacacagccaaaaagacttttgatcagtggaaagatatgataccggaccttagtgaatataaatggattgtgcctgacattgtgtgggaaattgatgagtatatcgattttgagaaaattagaaaagcccttcctagttcagaagaccttgtaaagttagcaccagactttgacaagattgttgaaagccttagcttattgaaggacttttttacctcaggttctccggaagaaacggcgtttagagcaacagatcgtggatctgaaagtgacaagcattttagaaaggtgtcagacaaagagaaaattgaccaacttcaggaagaacttctgcacactcagttgaagtatcagagaatcttggaacgattagaaaaggagaacaaagaattgagaaaattagtattgcagaaagatgacaaaggcattcatcatagaaagcttaagaaatctttgattgacatgtattctgaagttcttgatgttctctctgattatgatgccagttataatacgcaagatcatctgccacgggttgttgtggttggagatcagagtgctggaaagactagtgtgttggaaatgattgcccaagctcgaatattcccaagaggatctggggagatgatgacacgttctccagttaaggtgactctgagtgaaggtcctcaccatgtggccctatttaaagatagttctcgggagtttgatcttaccaaagaagaggatcttgcagcattaagacatgaaatagaacttcgaatgaggaaaaatgtgaaagaaggctgtaccgttagccctgagaccatatccttaaatgtaaaaggccctggactacagaggatggtgcttgttgacttaccaggtgtgattaatactgtgacatcaggcatggctcctgacacaaaggaaactattttcagtatcagcaaagcttacatgcagaatcctaatgccatcatactgtgtattcaagatggatctgtggatgctgaacgcagtattgttacagacttggtcagtcaaatggaccctcatggaaggagaaccatattcgttttgaccaaagtagacctggcagagaaaaatgtagccagtccaagcaggattcagcagataattgaaggaaagctcttcccaatgaaagctttaggttattttgctgttgtaacaggaaaagggaacagctctgaaagcattgaagctataagagaatatgaagaagagttttttcagaattcaaagctcctaaagacaagcatgctaaaggcacaccaagtgactacaagaaatttaagccttgcagtatcagactgcttttggaaaatggtacgagagtctgttgaacaacaggctgatagtttcaaagcaacacgttttaaccttgaaactgaatggaagaataactatcctcgcctgcgggaacttgaccggaatgaactatttgaaaaagctaaaaatgaaatccttgatgaagttatcagtctgagccaggttacaccaaaacattgggaggaaatccttcaacaatctttgtgggaaagagtatcaactcatgtgattgaaaacatctaccttccagctgcgcagaccatgaattcaggaacttttaacaccacagtggatatcaagcttaaacagtggactgataaacaacttcctaataaagcagtagaggttgcttgggagaccctacaagaagaattttcccgctttatgacagaaccgaaagggaaagagcatgatgacatatttgataaacttaaagaggctgttaaggaagaaagtattaaacgacacaagtggaatgactttgcggaggacagcttgagggttattcaacacaatgctttggaagaccgatccatatctgataaacagcaatgggatgcagctatttattttatggaagaggctctgcaggctcgtctcaaggatactgaaaatgcaattgaaaacatggtgggtccagactggaaaaagaggtggttatactggaagaatcggacccaagaacagtgtgttcacaatgaaaccaagaatgaattggagaagatgttgaaatgtaatgaggagcacccagcttatcttgcaagtgatgaaataaccacagtccggaagaaccttgaatcccgaggagtagaagtagatccaagcttgattaaggatacttggcatcaagtttatagaagacattttttaaaaacagctctaaaccattgtaacctttgtcgaagaggtttttattactaccaaaggcattttgtagattctgagttggaatgcaatgatgtggtcttgttttggcgtatacagcgcatgcttgctatcaccgcaaatactttaaggcaacaacttacaaatactgaagttaggcgattagagaaaaatgttaaagaggtattggaagattttgctgaagatggtgagaagaagattaaattgcttactggtaagcgcgttcaactggcggaagacctcaagaaagttagagaaattcaagaaaaacttgatgctttcattgaagctcttcatcaggagaaataatctagagcctcgactgtgccttctagttgccagccatctgttgtttgcccctcccccgtgccttccttgaccctggaaggtgccactcccactgtcctttcctaataaaatgaggaaattgcatcgcattgtctgagtaggtgtcattctattctggggggtggggtggggcaggacagcaagggggaggattgggaagagaatagcaggcatgctggggaaaaatttagggttagggttagggttagggaaaaatttagggttagggttagggttagggaaaaatttagggttagggttagggttagggaaaaacgcgtttttccctaaccctaaccctaaccctaaatttttccctaaccctaaccctaaccctaaatttttccctaaccctaaccctaaccctaaagcgcgctagatctgaggaacccctagtgatggagttggccactccctctctgcgcgctcgctcgctcactgaggccgggcgaccaaaggtcgcccgacgcccgggctttgcccgggcggcctcagtgagcgagcgagcgcgcagagagggagtggccaattaattaaggcgatgaacggtaatcgtaaaactagcatgtcaatcatatgtaccccggttgataatcagaaaagccccaaaaacaggaagattgtataagcattaattaatttaaatacatggacatgtcagaattggttaattggttgtaacactgacccctatttgtttatttttctaaatacattcaaatatgtatccgctcatgagacaataaccctgataaatgcttcaataatattgaaaaaggaagaatatgagccatattcaacgggaaacgtcgaggccgcgattaaattccaacatggatgctgatttatatgggtataaatgggctcgcgataatgtcgggcaatcaggtgcgacaatctatcgcttgtatgggaagcccgatgcgccagagttgtttctgaaacatggcaaaggtagcgttgccaatgatgttacagatgagatggtcagactaaactggctgacggaatttatgccacttccgaccatcaagcattttatccgtactcctgatgatgcatggttactcaccactgcgatccccggaaaaacagcgttccaggtattagaagaatatcctgattcaggtgaaaatattgttgatgcgctggcagtgttcctgcgccggttgcactcgattcctgtttgtaattgtccttttaacagcgatcgcgtatttcgcctcgctcaggcgcaatcacgaatgaataacggtttggttgatgcgagtgattttgatgacgagcgtaatggctggcctgttgaacaagtctggaaagaaatgcataaacttttgccattctcaccggattcagtcgtcactcatggtgatttctcacttgataaccttatttttgacgaggggaaattaataggttgtattgatgttggacgagtcggaatcgcagaccgataccaggatcttgccatcctatggaactgcctcggtgagttttctccttcattacagaaacggctttttcaaaaatatggtattgataatcctgatatgaataaattgcagtttcatttgatgctcgatgagtttttctaaaagcagagcattacgctgacttgacgggacggcgcaagctcatgaccaaaatcccttaacgtgagttacgcgcgcgtcgttccactgagcgtcagaccccgtagaaaagatcaaaggatcttcttgagatcctttttttctgcgcgtaatctgctgcttgcaaacaaaaaaaccaccgctaccagcggtggtttgtttgccggatcaagagctaccaactctttttccgaaggtaactggcttcagcagagcgcagataccaaatactgttcttctagtgtagccgtagttagcccaccacttcaagaactctgtagcaccgcctacatacctcgctctgctaatcctgttaccagtggctgctgccagtggcgataagtcgtgtcttaccgggttggactcaagacgatagttaccggataaggcgcagcggtcgggctgaacggggggttcgtgcacacagcccagcttggagcgaacgacctacaccgaactgagatacctacagcgtgagctatgagaaagcgccacgcttcccgaagggagaaaggcggacaggtatccggtaagcggcagggtcggaacaggagagcgcacgagggagcttccagggggaaacgcctggtatctttatagtcctgtcgggtttcgccacctctgacttgagcgtcgatttttgtgatgctcgtcaggggggcggagcctatggaaaaacgccagcaacgcggcctttttacggttcctggccttttgctggccttttgctcacatgtttaaaccatg

SEQ ID NO: 188 - DNA, 6437 bp, synthetic construct
  source 1..6437: mol_type = other DNA
tcctgcaggcagctgcgcgctcgctcgctcactgaggccgcccgggcaaagcccgggcgtcgggcgacctttggtcgcccggcctcagtgagcgagcgagcgcgcagagagggagtggccaactccatcactaggggttcctgcggccgcacgcgtggtacccaaaccatctgattcaacaatgcacgaccgatctcttatgggcttggcacacaccatctgcccattataaacgtctgcaaagaccaaggtttgatatgttgattttactgtcagccttaagagtgcgacatctgctaatttagtgtaataatacaatcagtagaccctttaaaacaagtcccttggcttggaacaacgccaggctcctcaacaggcaactttgctacttctacagaaaatgataataaagaaatgctggtgaagtcaaatgcttatcacaatggtgaactactcagcagggaggctctaataggcgccaagagcctagacttccttaagcgccagagtccacaagggcccagttaatcctcaacattcaaatgctgcccacaaaaccagcccctctgtgccctagccgcctcttttttccaagtgacagtagaactccaccaatccgcagctgaatggggtccgcctcttttccctgcctaaacagacaggaactcctgccaattgagggcgtcaccgctaaggctccgccccagcctgggctccacaaccaatgaagggtaatctcgacaaagagcaaggggtggggcgcgggcgcgcaggtgcagcagcacacaggctggtcgggagggcggggcgcgacgtctgccgtgcggggtcccggcatcggttgcgcgcgcgctccctcctctcggagagagggctgtggtaaaacccgtccggaaaagctagcggagtcgctgcgacgctgccttcgccccgtgccccgctccgccgccgcctcgcgccgcccgccccggctctgactgaccgcgttactcccacaggtgagcgggcgggacggcccttctcctccgggctgtaattagctgagctttaagggaaggttggttggtggggtattaatctttaattacctggagcacctgcctgaaatcactttttttcaggttggaccggtccaccatgtggcgactacgtcgggccgctgtggcctgtgaggtctgccagtctttagtgaaacacagctctggaataaaaggaagtttaccactacaaaaactacatctggtttcacgaagcatttatcattcacatcatcctaccttaaagcttcaacgaccccaattaaggacatcctttcagcagttctcttctctgacaaaccttcctttacgtaaactgaaattctctccaattaaatatggctaccagcctcgcaggaatttttggccagcaagattagctacgagactcttaaaacttcgctatctcatactaggatcggctgttgggggtggctacacagccaaaaagacttttgatcagtggaaagatatgataccggaccttagtgaatataaatggattgtgcctgacattgtgtgggaaattgatgagtatatcgattttgagaaaattagaaaagcccttcctagttcagaagaccttgtaaagttagcaccagactttgacaagattgttgaaagccttagcttattgaaggacttttttacctcaggttctccggaagaaacggcgtttagagcaacagatcgtggatctgaaagtgacaagcattttagaaaggtgtcagacaaagagaaaattgaccaacttcaggaagaacttctgcacactcagttgaagtatcagagaatcttggaacgattagaaaaggagaacaaagaattgagaaaattagtattgcagaaagatgacaaaggcattcatcatagaaagcttaagaaatctttgattgacatgtattctgaagttcttgatgttctctctgattatgatgccagttataatacgcaagatcatctgccacgggttgttgtggttggagatcagagtgctggaaagactagtgtgttggaaatgattgcccaagctcgaatattcccaagaggatctggggagatgatgacacgttctccagttaaggtgactctgagtgaaggtcctcaccatgtggccctatttaaagatagttctcgggagtttgatcttaccaaagaagaggatcttgcagcattaagacatgaaatagaacttcgaatgaggaaaaatgtgaaagaaggctgtaccgttagccctgagaccatatccttaaatgtaaaaggccctggactacagaggatggtgcttgttgacttaccaggtgtgattaatactgtgacatcaggcatggctcctgacacaaaggaaactattttcagtatcagcaaagcttacatgcagaatcctaatgccatcatactgtgtattcaagatggatctgtggatgctgaacgcagtattgttacagacttggtcagtcaaatggaccctcatggaaggagaaccatattcgttttgaccaaagtagacctggcagagaaaaatgtagccagtccaagcaggattcagcagataattgaaggaaagctcttcccaatgaaagctttaggttattttgctgttgtaacaggaaaagggaacagctctgaaagcattgaagctataagagaatatgaagaagagttttttcagaattcaaagctcctaaagacaagcatgctaaaggcacaccaagtgactacaagaaatttaagccttgcagtatcagactgcttttggaaaatggtacgagagtctgttgaacaacaggctgatagtttcaaagcaacacgttttaaccttgaaactgaatggaagaataactatcctcgcctgcgggaacttgaccggaatgaactatttgaaaaagctaaaaatgaaatccttgatgaagttatcagtctgagccaggttacaccaaaacattgggaggaaatccttcaacaatctttgtgggaaagagtatcaactcatgtgattgaaaacatctaccttccagctgcgcagaccatgaattcaggaacttttaacaccacagtggatatcaagcttaaacagtggactgataaacaacttcctaataaagcagtagaggttgcttgggagaccctacaagaagaattttcccgctttatgacagaaccgaaagggaaagagcatgatgacatatttgataaacttaaagaggctgttaaggaagaaagtattaaacgacacaagtggaatgactttgcggaggacagcttgagggttattcaacacaatgctttggaagaccgatccatatctgataaacagcaatgggatgcagctatttattttatggaagaggctctgcaggctcgtctcaaggatactgaaaatgcaattgaaaacatggtgggtccagactggaaaaagaggtggttatactggaagaatcggacccaagaacagtgtgttcacaatgaaaccaagaatgaattggagaagatgttgaaatgtaatgaggagcacccagcttatcttgcaagtgatgaaataaccacagtccggaagaaccttgaatcccgaggagtagaagtagatccaagcttgattaaggatacttggcatcaagtttatagaagacattttttaaaaacagctctaaaccattgtaacctttgtcgaagaggtttttattactaccaaaggcattttgtagattctgagttggaatgcaatgatgtggtcttgttttggcgtatacagcgcatgcttgctatcaccgcaaatactttaaggcaacaacttacaaatactgaagttaggcgattagagaaaaatgttaaagaggtattggaagattttgctgaagatggtgagaagaagattaaattgcttactggtaagcgcgttcaactggcggaagacctcaagaaagttagagaaattcaagaaaaacttgatgctttcattgaagctcttcatcaggagaaataatctagagcctcgactgtgccttctagttgccagccatctgttgtttgcccctcccccgtgccttccttgaccctggaaggtgccactcccactgtcctttcctaataaaatgaggaaattgcatcgcattgtctgagtaggtgtcattctattctggggggtggggtggggcaggacagcaagggggaggattgggaagagaatagcaggcatgctggggaaaaatttagggttagggttagggttagggaaaaatttagggttagggttagggttagggaaaaatttagggttagggttagggttagggaaaaacgcgtttttccctaaccctaaccctaaccctaaatttttccctaaccctaaccctaaccctaaatttttccctaaccctaaccctaaccctaaagcgcgctagatctgaggaacccctagtgatggagttggccactccctctctgcgcgctcgctcgctcactgaggccgggcgaccaaaggtcgcccgacgcccgggctttgcccgggcggcctcagtgagcgagcgagcgcgcagagagggagtggccaattaattaaggcgatgaacggtaatcgtaaaactagcatgtcaatcatatgtaccccggttgataatcagaaaagccccaaaaacaggaagattgtataagcattaattaatttaaatacatggacatgtcagaattggttaattggttgtaacactgacccctatttgtttatttttctaaatacattcaaatatgtatccgctcatgagacaataaccctgataaatgcttcaataatattgaaaaaggaagaatatgagccatattcaacgggaaacgtcgaggccgcgattaaattccaacatggatgctgatttatatgggtataaatgggctcgcgataatgtcgggcaatcaggtgcgacaatctatcgcttgtatgggaagcccgatgcgccagagttgtttctgaaacatggcaaaggtagcgttgccaatgatgttacagatgagatggtcagactaaactggctgacggaatttatgccacttccgaccatcaagcattttatccgtactcctgatgatgcatggttactcaccactgcgatccccggaaaaacagcgttccaggtattagaagaatatcctgattcaggtgaaaatattgttgatgcgctggcagtgttcctgcgccggttgcactcgattcctgtttgtaattgtccttttaacagcgatcgcgtatttcgcctcgctcaggcgcaatcacgaatgaataacggtttggttgatgcgagtgattttgatgacgagcgtaatggctggcctgttgaacaagtctggaaagaaatgcataaacttttgccattctcaccggattcagtcgtcactcatggtgatttctcacttgataaccttatttttgacgaggggaaattaataggttgtattgatgttggacgagtcggaatcgcagaccgataccaggatcttgccatcctatggaactgcctcggtgagttttctccttcattacagaaacggctttttcaaaaatatggtattgataatcctgatatgaataaattgcagtttcatttgatgctcgatgagtttttctaaaagcagagcattacgctgacttgacgggacggcgcaagctcatgaccaaaatcccttaacgtgagttacgcgcgcgtcgttccactgagcgtcagaccccgtagaaaagatcaaaggatcttcttgagatcctttttttctgcgcgtaatctgctgcttgcaaacaaaaaaaccaccgctaccagcggtggtttgtttgccggatcaagagctaccaactctttttccgaaggtaactggcttcagcagagcgcagataccaaatactgttcttctagtgtagccgtagttagcccaccacttcaagaactctgtagcaccgcctacatacctcgctctgctaatcctgttaccagtggctgctgccagtggcgataagtcgtgtcttaccgggttggactcaagacgatagttaccggataaggcgcagcggtcgggctgaacggggggttcgtgcacacagcccagcttggagcgaacgacctacaccgaactgagatacctacagcgtgagctatgagaaagcgccacgcttcccgaagggagaaaggcggacaggtatccggtaagcggcagggtcggaacaggagagcgcacgagggagcttccagggggaaacgcctggtatctttatagtcctgtcgggtttcgccacctctgacttgagcgtcgatttttgtgatgctcgtcaggggggcggagcctatggaaaaacgccagcaacgcggcctttttacggttcctggccttttgctggccttttgctcacatgtttaaaccatg

SEQ ID NO: 189 - DNA, 6284 bp, synthetic construct
  source 1..6284: mol_type = other DNA
ggccactccctctctgcgcgctcgctcgctcactgaggccgcccgggcaaagcccgggcgtcgggcgacctttggtcgcccggcctcagtgagcgagcgagcgcgcagagagggagtggccaactccatcactaggggttcctcagatctatgtgagcaaacagcagcatgctggggaaaaatttagggttagggttagggttagggaaaaatttagggttagggttagggttagggaaaaatttagggttagggttagggttagggaaaaacgcgtggtacccgttacataacttacggtaaatggcccgcctggctgaccgcccaacgacccccgcccattgacgtcaatagtaacgccaatagggactttccattgacgtcaatgggtggagtatttacggtaaactgcccacttggcagtacatcaagtgtatcatatgccaagtacgccccctattgacgtcaatgacggtaaatggcccgcctggcattgtgcccagtacatgaccttatgggactttcctacttggcagtacatctacgtattagtcatcgctattaccatggtcgaggtgagccccacgttctgcttcactctccccatctcccccccctccccacccccaattttgtatttatttattttttaattattttgtgcagcgatgggggcggggggggggggggggcgcgcgccaggcggggcggggcggggcgaggggcggggcggggcgaggcggagaggtgcggcggcagccaatcagagcggcgcgctccgaaagtttccttttatggcgaggcggcggcggcggcggccctataaaaagcgaagcgcgcggcgggcgggagtcgctgcgacgctgccttcgccccgtgccccgctccgccgccgcctcgcgccgcccgccccggctctgactgaccgcgttactcccacaggtgagcgggcgggacggcccttctcctccgggctgtaattagctgagctttaagggaaggttggttggtggggtattaatctttaattacctggagcacctgcctgaaatcactttttttcaggttggaccggtccaccatgtggcgactacgtcgggccgctgtggcctgtgaggtctgccagtctttagtgaaacacagctctggaataaaaggaagtttaccactacaaaaactacatctggtttcacgaagcatttatcattcacatcatcctaccttaaagcttcaacgaccccaattaaggacatcctttcagcagttctcttctctgacaaaccttcctttacgtaaactgaaattctctccaattaaatatggctaccagcctcgcaggaatttttggccagcaagattagctacgagactcttaaaacttcgctatctcatactaggatcggctgttgggggtggctacacagccaaaaagacttttgatcagtggaaagatatgataccggaccttagtgaatataaatggattgtgcctgacattgtgtgggaaattgatgagtatatcgattttgagaaaattagaaaagcccttcctagttcagaagaccttgtaaagttagcaccagactttgacaagattgttgaaagccttagcttattgaaggacttttttacctcaggttctccggaagaaacggcgtttagagcaacagatcgtggatctgaaagtgacaagcattttagaaaggtgtcagacaaagagaaaattgaccaacttcaggaagaacttctgcacactcagttgaagtatcagagaatcttggaacgattagaaaaggagaacaaagaattgagaaaattagtattgcagaaagatgacaaaggcattcatcatagaaagcttaagaaatctttgattgacatgtattctgaagttcttgatgttctctctgattatgatgccagttataatacgcaagatcatctgccacgggttgttgtggttggagatcagagtgctggaaagactagtgtgttggaaatgattgcccaagctcgaatattcccaagaggatctggggagatgatgacacgttctccagttaaggtgactctgagtgaaggtcctcaccatgtggccctatttaaagatagttctcgggagtttgatcttaccaaagaagaggatcttgcagcattaagacatgaaatagaacttcgaatgaggaaaaatgtgaaagaaggctgtaccgttagccctgagaccatatccttaaatgtaaaaggccctggactacagaggatggtgcttgttgacttaccaggtgtgattaatactgtgacatcaggcatggctcctgacacaaaggaaactattttcagtatcagcaaagcttacatgcagaatcctaatgccatcatactgtgtattcaagatggatctgtggatgctgaacgcagtattgttacagacttggtcagtcaaatggaccctcatggaaggagaaccatattcgttttgaccaaagtagacctggcagagaaaaatgtagccagtccaagcaggattcagcagataattgaaggaaagctcttcccaatgaaagctttaggttattttgctgttgtaacaggaaaagggaacagctctgaaagcattgaagctataagagaatatgaagaagagttttttcagaattcaaagctcctaaagacaagcatgctaaaggcacaccaagtgactacaagaaatttaagccttgcagtatcagactgcttttggaaaatggtacgagagtctgttgaacaacaggctgatagtttcaaagcaacacgttttaaccttgaaactgaatggaagaataactatcctcgcctgcgggaacttgaccggaatgaactatttgaaaaagctaaaaatgaaatccttgatgaagttatcagtctgagccaggttacaccaaaacattgggaggaaatccttcaacaatctttgtgggaaagagtatcaactcatgtgattgaaaacatctaccttccagctgcgcagaccatgaattcaggaacttttaacaccacagtggatatcaagcttaaacagtggactgataaacaacttcctaataaagcagtagaggttgcttgggagaccctacaagaagaattttcccgctttatgacagaaccgaaagggaaagagcatgatgacatatttgataaacttaaagaggctgttaaggaagaaagtattaaacgacacaagtggaatgactttgcggaggacagcttgagggttattcaacacaatgctttggaagaccgatccatatctgataaacagcaatgggatgcagctatttattttatggaagaggctctgcaggctcgtctcaaggatactgaaaatgcaattgaaaacatggtgggtccagactggaaaaagaggtggttatactggaagaatcggacccaagaacagtgtgttcacaatgaaaccaagaatgaattggagaagatgttgaaatgtaatgaggagcacccagcttatcttgcaagtgatgaaataaccacagtccggaagaaccttgaatcccgaggagtagaagtagatccaagcttgattaaggatacttggcatcaagtttatagaagacattttttaaaaacagctctaaaccattgtaacctttgtcgaagaggtttttattactaccaaaggcattttgtagattctgagttggaatgcaatgatgtggtcttgttttggcgtatacagcgcatgcttgctatcaccgcaaatactttaaggcaacaacttacaaatactgaagttaggcgattagagaaaaatgttaaagaggtattggaagattttgctgaagatggtgagaagaagattaaattgcttactggtaagcgcgttcaactggcggaagacctcaagaaagttagagaaattcaagaaaaacttgatgctttcattgaagctcttcatcaggagaaataatctagagcctcgactgtgccttctagttgccagccatctgttgtttgcccctcccccgtgccttccttgaccctggaaggtgccactcccactgtcctttcctaataaaatgaggaaattgcatcgcattgtctgagtaggtgtcattctattctggggggtggggtggggcaggacagcaagggggaggattgggaagagaatagcaggcatgctggggatcctttttccctaaccctaaccctaaccctaaatttttccctaaccctaaccctaaccctaaatttttccctaaccctaaccctaaccctaaatttttgcggccgcaggaacccctagtgatggagttggccactccctctctgcgcgctcgctcgctcactgaggccgggcgaccaaaggtcgcccgacgcccgggctttgcccgggcggcctcagtgagcgagcgagcgcgcagctgcctgcaggacatggtttaaacatgtgagcaaaaggccagcaaaaggccaggaaccgtaaaaaggccgcgttgctggcgtttttccataggctccgcccccctgacgagcatcacaaaaatcgacgctcaagtcagaggtggcgaaacccgacaggactataaagataccaggcgtttccccctggaagctccctcgtgcgctctcctgttccgaccctgccgcttaccggatacctgtccgcctttctcccttcgggaagcgtggcgctttctcatagctcacgctgtaggtatctcagttcggtgtaggtcgttcgctccaagctgggctgtgtgcacgaaccccccgttcagcccgaccgctgcgccttatccggtaactatcgtcttgagtccaacccggtaagacacgacttatcgccactggcagcagccactggtaacaggattagcagagcgaggtatgtaggcggtgctacagagttcttgaagtggtgggctaactacggctacactagaagaacagtatttggtatctgcgctctgctgaagccagttaccttcggaaaaagagttggtagctcttgatccggcaaacaaaccaccgctggtagcggtggtttttttgtttgcaagcagcagattacgcgcagaaaaaaaggatctcaagaagatcctttgatcttttctacggggtctgacgctcagtggaacgacgcgcgcgtaactcacgttaagggattttggtcatgagcttgcgccgtcccgtcaagtcagcgtaatgctctgcttttagaaaaactcatcgagcatcaaatgaaactgcaatttattcatatcaggattatcaataccatatttttgaaaaagccgtttctgtaatgaaggagaaaactcaccgaggcagttccataggatggcaagatcctggtatcggtctgcgattccgactcgtccaacatcaatacaacctattaatttcccctcgtcaaaaataaggttatcaagtgagaaatcaccatgagtgacgactgaatccggtgagaatggcaaaagtttatgcatttctttccagacttgttcaacaggccagccattacgctcgtcatcaaaatcactcgcatcaaccaaaccgttattcattcgtgattgcgcctgagcgaggcgaaatacgcgatcgctgttaaaaggacaattacaaacaggaatcgagtgcaaccggcgcaggaacactgccagcgcatcaacaatattttcacctgaatcaggatattcttctaatacctggaacgctgtttttccggggatcgcagtggtgagtaaccatgcatcatcaggagtacggataaaatgcttgatggtcggaagtggcataaattccgtcagccagtttagtctgaccatctcatctgtaacatcattggcaacgctacctttgccatgtttcagaaacaactctggcgcatcgggcttcccatacaagcgatagattgtcgcacctgattgcccgacattatcgcgagcccatttatacccatataaatcagcatccatgttggaatttaatcgcggcctcgacgtttcccgttgaatatggctcatattcttcctttttcaatattattgaagcatttatcagggttattgtctcatgagcggatacatatttgaatgtatttagaaaaataaacaaataggggtcagtgttacaaccaattaaccaattctgacatgtccatgtatttaaattaattaatgcttatacaatcttcctgtttttggggcttttctgattatcaaccggggtacatatgattgacatgctagttttacgattaccgttcatcgccttaattaatt

SEQ ID NO: 190 - DNA, 6461 bp, synthetic construct
  source 1..6461: mol_type = other DNA
ggccactccctctctgcgcgctcgctcgctcactgaggccgcccgggcaaagcccgggcgtcgggcgacctttggtcgcccggcctcagtgagcgagcgagcgcgcagagagggagtggccaactccatcactaggggttcctcagatctatgtgagcaaacagcagcatgctggggaaaaatttagggttagggttagggttagggaaaaatttagggttagggttagggttagggaaaaatttagggttagggttagggttagggaaaaacgcgtggtacccaaaccatctgattcaacaatgcacgaccgatctcttatgggcttggcacacaccatctgcccattataaacgtctgcaaagaccaaggtttgatatgttgattttactgtcagccttaagagtgcgacatctgctaatttagtgtaataatacaatcagtagaccctttaaaacaagtcccttggcttggaacaacgccaggctcctcaacaggcaactttgctacttctacagaaaatgataataaagaaatgctggtgaagtcaaatgcttatcacaatggtgaactactcagcagggaggctctaataggcgccaagagcctagacttccttaagcgccagagtccacaagggcccagttaatcctcaacattcaaatgctgcccacaaaaccagcccctctgtgccctagccgcctcttttttccaagtgacagtagaactccaccaatccgcagctgaatggggtccgcctcttttccctgcctaaacagacaggaactcctgccaattgagggcgtcaccgctaaggctccgccccagcctgggctccacaaccaatgaagggtaatctcgacaaagagcaaggggtggggcgcgggcgcgcaggtgcagcagcacacaggctggtcgggagggcggggcgcgacgtctgccgtgcggggtcccggcatcggttgcgcgcgcgctccctcctctcggagagagggctgtggtaaaacccgtccggaaaagctagcggagtcgctgcgacgctgccttcgccccgtgccccgctccgccgccgcctcgcgccgcccgccccggctctgactgaccgcgttactcccacaggtgagcgggcgggacggcccttctcctccgggctgtaattagctgagctttaagggaaggttggttggtggggtattaatctttaattacctggagcacctgcctgaaatcactttttttcaggttggaccggtccaccatgtggcgactacgtcgggccgctgtggcctgtgaggtctgccagtctttagtgaaacacagctctggaataaaaggaagtttaccactacaaaaactacatctggtttcacgaagcatttatcattcacatcatcctaccttaaagcttcaacgaccccaattaaggacatcctttcagcagttctcttctctgacaaaccttcctttacgtaaactgaaattctctccaattaaatatggctaccagcctcgcaggaatttttggccagcaagattagctacgagactcttaaaacttcgctatctcatactaggatcggctgttgggggtggctacacagccaaaaagacttttgatcagtggaaagatatgataccggaccttagtgaatataaatggattgtgcctgacattgtgtgggaaattgatgagtatatcgattttgagaaaattagaaaagcccttcctagttcagaagaccttgtaaagttagcaccagactttgacaagattgttgaaagccttagcttattgaaggacttttttacctcaggttctccggaagaaacggcgtttagagcaacagatcgtggatctgaaagtgacaagcattttagaaaggtgtcagacaaagagaaaattgaccaacttcaggaagaacttctgcacactcagttgaagtatcagagaatcttggaacgattagaaaaggagaacaaagaattgagaaaattagtattgcagaaagatgacaaaggcattcatcatagaaagcttaagaaatctttgattgacatgtattctgaagttcttgatgttctctctgattatgatgccagttataatacgcaagatcatctgccacgggttgttgtggttggagatcagagtgctggaaagactagtgtgttggaaatgattgcccaagctcgaatattcccaagaggatctggggagatgatgacacgttctccagttaaggtgactctgagtgaaggtcctcaccatgtggccctatttaaagatagttctcgggagtttgatcttaccaaagaagaggatcttgcagcattaagacatgaaatagaacttcgaatgaggaaaaatgtgaaagaaggctgtaccgttagccctgagaccatatccttaaatgtaaaaggccctggactacagaggatggtgcttgttgacttaccaggtgtgattaatactgtgacatcaggcatggctcctgacacaaaggaaactattttcagtatcagcaaagcttacatgcagaatcctaatgccatcatactgtgtattcaagatggatctgtggatgctgaacgcagtattgttacagacttggtcagtcaaatggaccctcatggaaggagaaccatattcgttttgaccaaagtagacctggcagagaaaaatgtagccagtccaagcaggattcagcagataattgaaggaaagctcttcccaatgaaagctttaggttattttgctgttgtaacaggaaaagggaacagctctgaaagcattgaagctataagagaatatgaagaagagttttttcagaattcaaagctcctaaagacaagcatgctaaaggcacaccaagtgactacaagaaatttaagccttgcagtatcagactgcttttggaaaatggtacgagagtctgttgaacaacaggctgatagtttcaaagcaacacgttttaaccttgaaactgaatggaagaataactatcctcgcctgcgggaacttgaccggaatgaactatttgaaaaagctaaaaatgaaatccttgatgaagttatcagtctgagccaggttacaccaaaacattgggaggaaatccttcaacaatctttgtgggaaagagtatcaactcatgtgattgaaaacatctaccttccagctgcgcagaccatgaattcaggaacttttaacaccacagtggatatcaagcttaaacagtggactgataaacaacttcctaataaagcagtagaggttgcttgggagaccctacaagaagaattttcccgctttatgacagaaccgaaagggaaagagcatgatgacatatttgataaacttaaagaggctgttaaggaagaaagtattaaacgacacaagtggaatgactttgcggaggacagcttgagggttattcaacacaatgctttggaagaccgatccatatctgataaacagcaatgggatgcagctatttattttatggaagaggctctgcaggctcgtctcaaggatactgaaaatgcaattgaaaacatggtgggtccagactggaaaaagaggtggttatactggaagaatcggacccaagaacagtgtgttcacaatgaaaccaagaatgaattggagaagatgttgaaatgtaatgaggagcacccagcttatcttgcaagtgatgaaataaccacagtccggaagaaccttgaatcccgaggagtagaagtagatccaagcttgattaaggatacttggcatcaagtttatagaagacattttttaaaaacagctctaaaccattgtaacctttgtcgaagaggtttttattactaccaaaggcattttgtagattctgagttggaatgcaatgatgtggtcttgttttggcgtatacagcgcatgcttgctatcaccgcaaatactttaaggcaacaacttacaaatactgaagttaggcgattagagaaaaatgttaaagaggtattggaagattttgctgaagatggtgagaagaagattaaattgcttactggtaagcgcgttcaactggcggaagacctcaagaaagttagagaaattcaagaaaaacttgatgctttcattgaagctcttcatcaggagaaataatctagagcctcgactgtgccttctagttgccagccatctgttgtttgcccctcccccgtgccttccttgaccctggaaggtgccactcccactgtcctttcctaataaaatgaggaaattgcatcgcattgtctgagtaggtgtcattctattctggggggtggggtggggcaggacagcaagggggaggattgggaagagaatagcaggcatgctggggatcctttttccctaaccctaaccctaaccctaaatttttccctaaccctaaccctaaccctaaatttttccctaaccctaaccctaaccctaaatttttgcggccgcaggaacccctagtgatggagttggccactccctctctgcgcgctcgctcgctcactgaggccgggcgaccaaaggtcgcccgacgcccgggctttgcccgggcggcctcagtgagcgagcgagcgcgcagctgcctgcaggacatggtttaaacatgtgagcaaaaggccagcaaaaggccaggaaccgtaaaaaggccgcgttgctggcgtttttccataggctccgcccccctgacgagcatcacaaaaatcgacgctcaagtcagaggtggcgaaacccgacaggactataaagataccaggcgtttccccctggaagctccctcgtgcgctctcctgttccgaccctgccgcttaccggatacctgtccgcctttctcccttcgggaagcgtggcgctttctcatagctcacgctgtaggtatctcagttcggtgtaggtcgttcgctccaagctgggctgtgtgcacgaaccccccgttcagcccgaccgctgcgccttatccggtaactatcgtcttgagtccaacccggtaagacacgacttatcgccactggcagcagccactggtaacaggattagcagagcgaggtatgtaggcggtgctacagagttcttgaagtggtgggctaactacggctacactagaagaacagtatttggtatctgcgctctgctgaagccagttaccttcggaaaaagagttggtagctcttgatccggcaaacaaaccaccgctggtagcggtggtttttttgtttgcaagcagcagattacgcgcagaaaaaaaggatctcaagaagatcctttgatcttttctacggggtctgacgctcagtggaacgacgcgcgcgtaactcacgttaagggattttggtcatgagcttgcgccgtcccgtcaagtcagcgtaatgctctgcttttagaaaaactcatcgagcatcaaatgaaactgcaatttattcatatcaggattatcaataccatatttttgaaaaagccgtttctgtaatgaaggagaaaactcaccgaggcagttccataggatggcaagatcctggtatcggtctgcgattccgactcgtccaacatcaatacaacctattaatttcccctcgtcaaaaataaggttatcaagtgagaaatcaccatgagtgacgactgaatccggtgagaatggcaaaagtttatgcatttctttccagacttgttcaacaggccagccattacgctcgtcatcaaaatcactcgcatcaaccaaaccgttattcattcgtgattgcgcctgagcgaggcgaaatacgcgatcgctgttaaaaggacaattacaaacaggaatcgagtgcaaccggcgcaggaacactgccagcgcatcaacaatattttcacctgaatcaggatattcttctaatacctggaacgctgtttttccggggatcgcagtggtgagtaaccatgcatcatcaggagtacggataaaatgcttgatggtcggaagtggcataaattccgtcagccagtttagtctgaccatctcatctgtaacatcattggcaacgctacctttgccatgtttcagaaacaactctggcgcatcgggcttcccatacaagcgatagattgtcgcacctgattgcccgacattatcgcgagcccatttatacccatataaatcagcatccatgttggaatttaatcgcggcctcgacgtttcccgttgaatatggctcatattcttcctttttcaatattattgaagcatttatcagggttattgtctcatgagcggatacatatttgaatgtatttagaaaaataaacaaataggggtcagtgttacaaccaattaaccaattctgacatgtccatgtatttaaattaattaatgcttatacaatcttcctgtttttggggcttttctgattatcaaccggggtacatatgattgacatgctagttttacgattaccgttcatcgccttaattaatt

SEQ ID NO: 191 - DNA, 6251 bp, synthetic construct
  source 1..6251: mol_type = other DNA
ggccactccctctctgcgcgctcgctcgctcactgaggccgcccgggcaaagcccgggcgtcgggcgacctttggtcgcccggcctcagtgagcgagcgagcgcgcagagagggagtggccaactccatcactaggggttcctcagatctatgtgagcaaacagcagcatgctggggaaaaatttagggttagggttagggttagggaaaaatttagggttagggttagggttagggaaaaatttagggttagggttagggttagggaaaaacgcgtggtacccgttacataacttacggtaaatggcccgcctggctgaccgcccaacgacccccgcccattgacgtcaatagtaacgccaatagggactttccattgacgtcaatgggtggagtatttacggtaaactgcccacttggcagtacatcaagtgtatcatatgccaagtacgccccctattgacgtcaatgacggtaaatggcccgcctggcattgtgcccagtacatgaccttatgggactttcctacttggcagtacatctacgtattagtcatcgctattaccatggtcgaggtgagccccacgttctgcttcactctccccatctcccccccctccccacccccaattttgtatttatttattttttaattattttgtgcagcgatgggggcggggggggggggggggcgcgcgccaggcggggcggggcggggcgaggggcggggcggggcgaggcggagaggtgcggcggcagccaatcagagcggcgcgctccgaaagtttccttttatggcgaggcggcggcggcggcggccctataaaaagcgaagcgcgcggcgggcgggagtcgctgcgacgctgccttcgccccgtgccccgctccgccgccgcctcgcgccgcccgccccggctctgactgaccgcgttactcccacaggtgagcgggcgggacggcccttctcctccgggctgtaattagctgagctttaagggaaggttggttggtggggtattaatctttaattacctggagcacctgcctgaaatcactttttttcaggttggaccggtccaccatgtggcgactacgtcgggccgctgtggcctgtgaggtctgccagtctttagtgaaacacagctctggaataaaaggaagtttaccactacaaaaactacatctggtttcacgaagcatttatcattcacatcatcctaccttaaagcttcaacgaccccaattaaggacatcctttcagcagttctcttctctgacaaaccttcctttacgtaaactgaaattctctccaattaaatatggctaccagcctcgcaggaatttttggccagcaagattagctacgagactcttaaaacttcgctatctcatactaggatcggctgttgggggtggctacacagccaaaaagacttttgatcagtggaaagatatgataccggaccttagtgaatataaatggattgtgcctgacattgtgtgggaaattgatgagtatatcgattttgagaaaattagaaaagcccttcctagttcagaagaccttgtaaagttagcaccagactttgacaagattgttgaaagccttagcttattgaaggacttttttacctcaggttctccggaagaaagtgacaagcattttagaaaggtgtcagacaaagagaaaattgaccaacttcaggaagaacttctgcacactcagttgaagtatcagagaatcttggaacgattagaaaaggagaacaaagaattgagaaaattagtattgcagaaagatgacaaaggcattcatcatagaaagcttaagaaatctttgattgacatgtattctgaagttcttgatgttctctctgattatgatgccagttataatacgcaagatcatctgccacgggttgttgtggttggagatcagagtgctggaaagactagtgtgttggaaatgattgcccaagctcgaatattcccaagaggatctggggagatgatgacacgttctccagttaaggtgactctgagtgaaggtcctcaccatgtggccctatttaaagatagttctcgggagtttgatcttaccaaagaagaggatcttgcagcattaagacatgaaatagaacttcgaatgaggaaaaatgtgaaagaaggctgtaccgttagccctgagaccatatccttaaatgtaaaaggccctggactacagaggatggtgcttgttgacttaccaggtgtgattaatactgtgacatcaggcatggctcctgacacaaaggaaactattttcagtatcagcaaagcttacatgcagaatcctaatgccatcatactgtgtattcaagatggatctgtggatgctgaacgcagtattgttacagacttggtcagtcaaatggaccctcatggaaggagaaccatattcgttttgaccaaagtagacctggcagagaaaaatgtagccagtccaagcaggattcagcagataattgaaggaaagctcttcccaatgaaagctttaggttattttgctgttgtaacaggaaaagggaacagctctgaaagcattgaagctataagagaatatgaagaagagttttttcagaattcaaagctcctaaagacaagcatgctaaaggcacaccaagtgactacaagaaatttaagccttgcagtatcagactgcttttggaaaatggtacgagagtctgttgaacaacaggctgatagtttcaaagcaacacgttttaaccttgaaactgaatggaagaataactatcctcgcctgcgggaacttgaccggaatgaactatttgaaaaagctaaaaatgaaatccttgatgaagttatcagtctgagccaggttacaccaaaacattgggaggaaatccttcaacaatctttgtgggaaagagtatcaactcatgtgattgaaaacatctaccttccagctgcgcagaccatgaattcaggaacttttaacaccacagtggatatcaagcttaaacagtggactgataaacaacttcctaataaagcagtagaggttgcttgggagaccctacaagaagaattttcccgctttatgacagaaccgaaagggaaagagcatgatgacatatttgataaacttaaagaggctgttaaggaagaaagtattaaacgacacaagtggaatgactttgcggaggacagcttgagggttattcaacacaatgctttggaagaccgatccatatctgataaacagcaatgggatgcagctatttattttatggaagaggctctgcaggctcgtctcaaggatactgaaaatgcaattgaaaacatggtgggtccagactggaaaaagaggtggttatactggaagaatcggacccaagaacagtgtgttcacaatgaaaccaagaatgaattggagaagatgttgaaatgtaatgaggagcacccagcttatcttgcaagtgatgaaataaccacagtccggaagaaccttgaatcccgaggagtagaagtagatccaagcttgattaaggatacttggcatcaagtttatagaagacattttttaaaaacagctctaaaccattgtaacctttgtcgaagaggtttttattactaccaaaggcattttgtagattctgagttggaatgcaatgatgtggtcttgttttggcgtatacagcgcatgcttgctatcaccgcaaatactttaaggcaacaacttacaaatactgaagttaggcgattagagaaaaatgttaaagaggtattggaagattttgctgaagatggtgagaagaagattaaattgcttactggtaagcgcgttcaactggcggaagacctcaagaaagttagagaaattcaagaaaaacttgatgctttcattgaagctcttcatcaggagaaataatctagagcctcgactgtgccttctagttgccagccatctgttgtttgcccctcccccgtgccttccttgaccctggaaggtgccactcccactgtcctttcctaataaaatgaggaaattgcatcgcattgtctgagtaggtgtcattctattctggggggtggggtggggcaggacagcaagggggaggattgggaagagaatagcaggcatgctggggatcctttttccctaaccctaaccctaaccctaaatttttccctaaccctaaccctaaccctaaatttttccctaaccctaaccctaaccctaaatttttgcggccgcaggaacccctagtgatggagttggccactccctctctgcgcgctcgctcgctcactgaggccgggcgaccaaaggtcgcccgacgcccgggctttgcccgggcggcctcagtgagcgagcgagcgcgcagctgcctgcaggacatggtttaaacatgtgagcaaaaggccagcaaaaggccaggaaccgtaaaaaggccgcgttgctggcgtttttccataggctccgcccccctgacgagcatcacaaaaatcgacgctcaagtcagaggtggcgaaacccgacaggactataaagataccaggcgtttccccctggaagctccctcgtgcgctctcctgttccgaccctgccgcttaccggatacctgtccgcctttctcccttcgggaagcgtggcgctttctcatagctcacgctgtaggtatctcagttcggtgtaggtcgttcgctccaagctgggctgtgtgcacgaaccccccgttcagcccgaccgctgcgccttatccggtaactatcgtcttgagtccaacccggtaagacacgacttatcgccactggcagcagccactggtaacaggattagcagagcgaggtatgtaggcggtgctacagagttcttgaagtggtgggctaactacggctacactagaagaacagtatttggtatctgcgctctgctgaagccagttaccttcggaaaaagagttggtagctcttgatccggcaaacaaaccaccgctggtagcggtggtttttttgtttgcaagcagcagattacgcgcagaaaaaaaggatctcaagaagatcctttgatcttttctacggggtctgacgctcagtggaacgacgcgcgcgtaactcacgttaagggattttggtcatgagcttgcgccgtcccgtcaagtcagcgtaatgctctgcttttagaaaaactcatcgagcatcaaatgaaactgcaatttattcatatcaggattatcaataccatatttttgaaaaagccgtttctgtaatgaaggagaaaactcaccgaggcagttccataggatggcaagatcctggtatcggtctgcgattccgactcgtccaacatcaatacaacctattaatttcccctcgtcaaaaataaggttatcaagtgagaaatcaccatgagtgacgactgaatccggtgagaatggcaaaagtttatgcatttctttccagacttgttcaacaggccagccattacgctcgtcatcaaaatcactcgcatcaaccaaaccgttattcattcgtgattgcgcctgagcgaggcgaaatacgcgatcgctgttaaaaggacaattacaaacaggaatcgagtgcaaccggcgcaggaacactgccagcgcatcaacaatattttcacctgaatcaggatattcttctaatacctggaacgctgtttttccggggatcgcagtggtgagtaaccatgcatcatcaggagtacggataaaatgcttgatggtcggaagtggcataaattccgtcagccagtttagtctgaccatctcatctgtaacatcattggcaacgctacctttgccatgtttcagaaacaactctggcgcatcgggcttcccatacaagcgatagattgtcgcacctgattgcccgacattatcgcgagcccatttatacccatataaatcagcatccatgttggaatttaatcgcggcctcgacgtttcccgttgaatatggctcatattcttcctttttcaatattattgaagcatttatcagggttattgtctcatgagcggatacatatttgaatgtatttagaaaaataaacaaataggggtcagtgttacaaccaattaaccaattctgacatgtccatgtatttaaattaattaatgcttatacaatcttcctgtttttggggcttttctgattatcaaccggggtacatatgattgacatgctagttttacgattaccgttcatcgccttaattaatt

SEQ ID NO: 192 - DNA, 6395 bp, synthetic construct
  source 1..6395: mol_type = other DNA
ggccactccctctctgcgcgctcgctcgctcactgaggccgcccgggcaaagcccgggcgtcgggcgacctttggtcgcccggcctcagtgagcgagcgagcgcgcagagagggagtggccaactccatcactaggggttcctcagatctatgtgagcaaacagcagcatgctggggaaaaatttagggttagggttagggttagggaaaaatttagggttagggttagggttagggaaaaatttagggttagggttagggttagggaaaaacgcgtggtacccgttacataacttacggtaaatggcccgcctggctgaccgcccaacgacccccgcccattgacgtcaatagtaacgccaatagggactttccattgacgtcaatgggtggagtatttacggtaaactgcccacttggcagtacatcaagtgtatcatatgccaagtacgccccctattgacgtcaatgacggtaaatggcccgcctggcattgtgcccagtacatgaccttatgggactttcctacttggcagtacatctacgtattagtcatcgctattaccatggtcgaggtgagccccacgttctgcttcactctccccatctcccccccctccccacccccaattttgtatttatttattttttaattattttgtgcagcgatgggggcggggggggggggggggcgcgcgccaggcggggcggggcggggcgaggggcggggcggggcgaggcggagaggtgcggcggcagccaatcagagcggcgcgctccgaaagtttccttttatggcgaggcggcggcggcggcggccctataaaaagcgaagcgcgcggcgggcgggagtcgctgcgacgctgccttcgccccgtgccccgctccgccgccgcctcgcgccgcccgccccggctctgactgaccgcgttactcccacaggtgagcgggcgggacggcccttctcctccgggctgtaattagctgagctttaagggaaggttggttggtggggtattaatctttaattacctggagcacctgcctgaaatcactttttttcaggttggaccggtccaccatgtggcgactacgtcgggccgctgtggcctgtgaggtctgccagtctttagtgaaacacagctctggaataaaaggaagtttaccactacaaaaactacatctggtttcacgaagcatttatcattcacatcatcctaccttaaagcttcaacgaccccaattaaggacatcctttcagcagttctcttctctgacaaaccttcctttacgtaaactgaaattctctccaattaaatatggctaccagcctcgcaggaatttttggccagcaagattagctacgagactcttaaaacttcgctatctcatactaggatcggctgttgggggtggctacacagccaaaaagacttttgatcagtggaaagatatgataccggaccttagtgaatataaatggattgtgcctgacattgtgtgggaaattgatgagtatatcgattttgagaaaattagaaaagcccttcctagttcagaagaccttgtaaagttagcaccagactttgacaagattgttgaaagccttagcttattgaaggacttttttacctcaggttctccggaagaaacggcgtttagagcaacagatcgtggatctgaaagtgacaagcattttagaaagggtctgcttggtgagctcattctcttacaacaacaaattcaagagcatgaagaggaagcgcgcagagccgctggccaatatagcacgagctatgcccaacagaagcgcaaggtgtcagacaaagagaaaattgaccaacttcaggaagaacttctgcacactcagttgaagtatcagagaatcttggaacgattagaaaaggagaacaaagaattgagaaaattagtattgcagaaagatgacaaaggcattcatcatagaaagcttaagaaatctttgattgacatgtattctgaagttcttgatgttctctctgattatgatgccagttataatacgcaagatcatctgccacgggttgttgtggttggagatcagagtgctggaaagactagtgtgttggaaatgattgcccaagctcgaatattcccaagaggatctggggagatgatgacacgttctccagttaaggtgactctgagtgaaggtcctcaccatgtggccctatttaaagatagttctcgggagtttgatcttaccaaagaagaggatcttgcagcattaagacatgaaatagaacttcgaatgaggaaaaatgtgaaagaaggctgtaccgttagccctgagaccatatccttaaatgtaaaaggccctggactacagaggatggtgcttgttgacttaccaggtgtgattaatactgtgacatcaggcatggctcctgacacaaaggaaactattttcagtatcagcaaagcttacatgcagaatcctaatgccatcatactgtgtattcaagatggatctgtggatgctgaacgcagtattgttacagacttggtcagtcaaatggaccctcatggaaggagaaccatattcgttttgaccaaagtagacctggcagagaaaaatgtagccagtccaagcaggattcagcagataattgaaggaaagctcttcccaatgaaagctttaggttattttgctgttgtaacaggaaaagggaacagctctgaaagcattgaagctataagagaatatgaagaagagttttttcagaattcaaagctcctaaagacaagcatgctaaaggcacaccaagtgactacaagaaatttaagccttgcagtatcagactgcttttggaaaatggtacgagagtctgttgaacaacaggctgatagtttcaaagcaacacgttttaaccttgaaactgaatggaagaataactatcctcgcctgcgggaacttgaccggaatgaactatttgaaaaagctaaaaatgaaatccttgatgaagttatcagtctgagccaggttacaccaaaacattgggaggaaatccttcaacaatctttgtgggaaagagtatcaactcatgtgattgaaaacatctaccttccagctgcgcagaccatgaattcaggaacttttaacaccacagtggatatcaagcttaaacagtggactgataaacaacttcctaataaagcagtagaggttgcttgggagaccctacaagaagaattttcccgctttatgacagaaccgaaagggaaagagcatgatgacatatttgataaacttaaagaggctgttaaggaagaaagtattaaacgacacaagtggaatgactttgcggaggacagcttgagggttattcaacacaatgctttggaagaccgatccatatctgataaacagcaatgggatgcagctatttattttatggaagaggctctgcaggctcgtctcaaggatactgaaaatgcaattgaaaacatggtgggtccagactggaaaaagaggtggttatactggaagaatcggacccaagaacagtgtgttcacaatgaaaccaagaatgaattggagaagatgttgaaatgtaatgaggagcacccagcttatcttgcaagtgatgaaataaccacagtccggaagaaccttgaatcccgaggagtagaagtagatccaagcttgattaaggatacttggcatcaagtttatagaagacattttttaaaaacagctctaaaccattgtaacctttgtcgaagaggtttttattactaccaaaggcattttgtagattctgagttggaatgcaatgatgtggtcttgttttggcgtatacagcgcatgcttgctatcaccgcaaatactttaaggcaacaacttacaaatactgaagttaggcgattagagaaaaatgttaaagaggtattggaagattttgctgaagatggtgagaagaagattaaattgcttactggtaagcgcgttcaactggcggaagacctcaagaaagttagagaaattcaagaaaaacttgatgctttcattgaagctcttcatcaggagaaataatctagagcctcgactgtgccttctagttgccagccatctgttgtttgcccctcccccgtgccttccttgaccctggaaggtgccactcccactgtcctttcctaataaaatgaggaaattgcatcgcattgtctgagtaggtgtcattctattctggggggtggggtggggcaggacagcaagggggaggattgggaagagaatagcaggcatgctggggatcctttttccctaaccctaaccctaaccctaaatttttccctaaccctaaccctaaccctaaatttttccctaaccctaaccctaaccctaaatttttgcggccgcaggaacccctagtgatggagttggccactccctctctgcgcgctcgctcgctcactgaggccgggcgaccaaaggtcgcccgacgcccgggctttgcccgggcggcctcagtgagcgagcgagcgcgcagctgcctgcaggacatggtttaaacatgtgagcaaaaggccagcaaaaggccaggaaccgtaaaaaggccgcgttgctggcgtttttccataggctccgcccccctgacgagcatcacaaaaatcgacgctcaagtcagaggtggcgaaacccgacaggactataaagataccaggcgtttccccctggaagctccctcgtgcgctctcctgttccgaccctgccgcttaccggatacctgtccgcctttctcccttcgggaagcgtggcgctttctcatagctcacgctgtaggtatctcagttcggtgtaggtcgttcgctccaagctgggctgtgtgcacgaaccccccgttcagcccgaccgctgcgccttatccggtaactatcgtcttgagtccaacccggtaagacacgacttatcgccactggcagcagccactggtaacaggattagcagagcgaggtatgtaggcggtgctacagagttcttgaagtggtgggctaactacggctacactagaagaacagtatttggtatctgcgctctgctgaagccagttaccttcggaaaaagagttggtagctcttgatccggcaaacaaaccaccgctggtagcggtggtttttttgtttgcaagcagcagattacgcgcagaaaaaaaggatctcaagaagatcctttgatcttttctacggggtctgacgctcagtggaacgacgcgcgcgtaactcacgttaagggattttggtcatgagcttgcgccgtcccgtcaagtcagcgtaatgctctgcttttagaaaaactcatcgagcatcaaatgaaactgcaatttattcatatcaggattatcaataccatatttttgaaaaagccgtttctgtaatgaaggagaaaactcaccgaggcagttccataggatggcaagatcctggtatcggtctgcgattccgactcgtccaacatcaatacaacctattaatttcccctcgtcaaaaataaggttatcaagtgagaaatcaccatgagtgacgactgaatccggtgagaatggcaaaagtttatgcatttctttccagacttgttcaacaggccagccattacgctcgtcatcaaaatcactcgcatcaaccaaaccgttattcattcgtgattgcgcctgagcgaggcgaaatacgcgatcgctgttaaaaggacaattacaaacaggaatcgagtgcaaccggcgcaggaacactgccagcgcatcaacaatattttcacctgaatcaggatattcttctaatacctggaacgctgtttttccggggatcgcagtggtgagtaaccatgcatcatcaggagtacggataaaatgcttgatggtcggaagtggcataaattccgtcagccagtttagtctgaccatctcatctgtaacatcattggcaacgctacctttgccatgtttcagaaacaactctggcgcatcgggcttcccatacaagcgatagattgtcgcacctgattgcccgacattatcgcgagcccatttatacccatataaatcagcatccatgttggaatttaatcgcggcctcgacgtttcccgttgaatatggctcatattcttcctttttcaatattattgaagcatttatcagggttattgtctcatgagcggatacatatttgaatgtatttagaaaaataaacaaataggggtcagtgttacaaccaattaaccaattctgacatgtccatgtatttaaattaattaatgcttatacaatcttcctgtttttggggcttttctgattatcaaccggggtacatatgattgacatgctagttttacgattaccgttcatcgccttaattaatt

SEQ ID NO: 193 - DNA, 6350 bp, synthetic construct
  source 1..6350: mol_type = other DNA
ggccactccctctctgcgcgctcgctcgctcactgaggccgcccgggcaaagcccgggcgtcgggcgacctttggtcgcccggcctcagtgagcgagcgagcgcgcagagagggagtggccaactccatcactaggggttcctcagatctatgtgagcaaacagcagcatgctggggaaaaatttagggttagggttagggttagggaaaaatttagggttagggttagggttagggaaaaatttagggttagggttagggttagggaaaaacgcgtggtacccgttacataacttacggtaaatggcccgcctggctgaccgcccaacgacccccgcccattgacgtcaatagtaacgccaatagggactttccattgacgtcaatgggtggagtatttacggtaaactgcccacttggcagtacatcaagtgtatcatatgccaagtacgccccctattgacgtcaatgacggtaaatggcccgcctggcattgtgcccagtacatgaccttatgggactttcctacttggcagtacatctacgtattagtcatcgctattaccatggtcgaggtgagccccacgttctgcttcactctccccatctcccccccctccccacccccaattttgtatttatttattttttaattattttgtgcagcgatgggggcggggggggggggggggcgcgcgccaggcggggcggggcggggcgaggggcggggcggggcgaggcggagaggtgcggcggcagccaatcagagcggcgcgctccgaaagtttccttttatggcgaggcggcggcggcggcggccctataaaaagcgaagcgcgcggcgggcgggagtcgctgcgacgctgccttcgccccgtgccccgctccgccgccgcctcgcgccgcccgccccggctctgactgaccgcgttactcccacaggtgagcgggcgggacggcccttctcctccgggctgtaattagctgagctttaagggaaggttggttggtggggtattaatctttaattacctggagcacctgcctgaaatcactttttttcaggttggaccggtccaccatgtggcgactacgtcgggccgctgtggcctgtgaggtctgccagtctttagtgaaacacagctctggaataaaaggaagtttaccactacaaaaactacatctggtttcacgaagcatttatcattcacatcatcctaccttaaagcttcaacgaccccaattaaggacatcctttcagcagttctcttctctgacaaaccttcctttacgtaaactgaaattctctccaattaaatatggctaccagcctcgcaggaatttttggccagcaagattagctacgagactcttaaaacttcgctatctcatactaggatcggctgttgggggtggctacacagccaaaaagacttttgatcagtggaaagatatgataccggaccttagtgaatataaatggattgtgcctgacattgtgtgggaaattgatgagtatatcgattttgagaaaattagaaaagcccttcctagttcagaagaccttgtaaagttagcaccagactttgacaagattgttgaaagccttagcttattgaaggacttttttacctcaggttctccggaagaaacggcgtttagagcaacagatcgtggatctgaaagtgacaagcattttagaaaggtgtcagacaaagagaaaattgaccaacttcaggaagaacttctgcacactcagttgaagtatcagagaatcttggaacgattagaaaaggagaacaaagaattgagaaaattagtattgcagaaagatgacaaaggcattcatcatagaaagcttaagaaatctttgattgacatgtattctgaagttcttgatgttctctctgattatgatgccagttataatacgcaagatcatctgccacgggttgttgtggttggagatcagagtgctggaaagactagtgtgttggaaatgattgcccaagctcgaatattcccaagaggatctggggagatgatgacacgttctccagttaaggtgactctgagtgaaggtcctcaccatgtggccctatttaaagatagttctcgggagtttgatcttaccaaagaagaggatcttgcagcattaagacatgaaatagaacttcgaatgaggaaaaatgtgaaagaaggctgtaccgttagccctgagaccatatccttaaatgtaaaaggccctggactacagaggatggtgcttgttgacttaccaggtgtgattaatactgtgacatcaggcatggctcctgacacaaaggaaactattttcagtatcagcaaagcttacatgcagaatcctaatgccatcatactgtgtattcaagatggatctgtggatgctgaacgcagtattgttacagacttggtcagtcaaatggaccctcatggaaggagaaccatattcgttttgaccaaagtagacctggcagagaaaaatgtagccagtccaagcaggattcagcagataattgaaggaaagctcttcccaatgaaagctttaggttattttgctgttgtaacaggaaaagggaacagctctgaaagcattgaagctataagagaatatgaagaagagttttttcagaattcaaagctcctaaagacaagcatgctaaaggcacaccaagtgactacaagaaatttaagccttgcagtatcagactgcttttggaaaatggtacgagagtctgttgaacaacaggctgatagtttcaaagcaacacgttttaaccttgaaactgaatggaagaataactatcctcgcctgcgggaacttgaccggaatgaactatttgaaaaagctaaaaatgaaatccttgatgaagttatcagtctgagccaggttacaccaaaacattgggaggaaatccttcaacaatctttgtgggaaagagtatcaactcatgtgattgaaaacatctaccttccagctgcgcagaccatgaattcaggaacttttaacaccacagtggatatcaagcttaaacagtggactgataaacaacttcctaataaagcagtagaggttgcttgggagaccctacaagaagaattttcccgctttatgacagaaccgaaagggaaagagcatgatgacatatttgataaacttaaagaggctgttaaggaagaaagtattaaacgacacaagtggaatgactttgcggaggacagcttgagggttattcaacacaatgctttggaagaccgatccatatctgataaacagcaatgggatgcagctatttattttatggaagaggctctgcaggctcgtctcaaggatactgaaaatgcaattgaaaacatggtgggtccagactggaaaaagaggtggttatactggaagaatcggacccaagaacagtgtgttcacaatgaaaccaagaatgaattggagaagatgttgaaatgtaatgaggagcacccagcttatcttgcaagtgatgaaataaccacagtccggaagaaccttgaatcccgaggagtagaagtagatccaagcttgattaaggatacttggcatcaagtttatagaagacattttttaaaaacagctctaaaccattgtaacctttgtcgaagaggtttttattactaccaaaggcattttgtagattctgagttggaatgcaatgatgtggtcttgttttggcgtatacagcgcatgcttgctatcaccgcaaatactttaaggcaacaacttacaaatactgaagttaggcgattagagaaaaatgttaaagaggtattggaagattttgctgaagatggtgagaagaagattaaattgcttactggtaagcgcgttcaactggcggaagacctcaagaaagttagagaaattcaagaaaaacttgatgctttcattgaagctcttcatcaggagaaagactacaaagaccatgacggtgattataaagatcatgacatcgattacaaggatgacgatgacaagtaatctagagcctcgactgtgccttctagttgccagccatctgttgtttgcccctcccccgtgccttccttgaccctggaaggtgccactcccactgtcctttcctaataaaatgaggaaattgcatcgcattgtctgagtaggtgtcattctattctggggggtggggtggggcaggacagcaagggggaggattgggaagagaatagcaggcatgctggggatcctttttccctaaccctaaccctaaccctaaatttttccctaaccctaaccctaaccctaaatttttccctaaccctaaccctaaccctaaatttttgcggccgcaggaacccctagtgatggagttggccactccctctctgcgcgctcgctcgctcactgaggccgggcgaccaaaggtcgcccgacgcccgggctttgcccgggcggcctcagtgagcgagcgagcgcgcagctgcctgcaggacatggtttaaacatgtgagcaaaaggccagcaaaaggccaggaaccgtaaaaaggccgcgttgctggcgtttttccataggctccgcccccctgacgagcatcacaaaaatcgacgctcaagtcagaggtggcgaaacccgacaggactataaagataccaggcgtttccccctggaagctccctcgtgcgctctcctgttccgaccctgccgcttaccggatacctgtccgcctttctcccttcgggaagcgtggcgctttctcatagctcacgctgtaggtatctcagttcggtgtaggtcgttcgctccaagctgggctgtgtgcacgaaccccccgttcagcccgaccgctgcgccttatccggtaactatcgtcttgagtccaacccggtaagacacgacttatcgccactggcagcagccactggtaacaggattagcagagcgaggtatgtaggcggtgctacagagttcttgaagtggtgggctaactacggctacactagaagaacagtatttggtatctgcgctctgctgaagccagttaccttcggaaaaagagttggtagctcttgatccggcaaacaaaccaccgctggtagcggtggtttttttgtttgcaagcagcagattacgcgcagaaaaaaaggatctcaagaagatcctttgatcttttctacggggtctgacgctcagtggaacgacgcgcgcgtaactcacgttaagggattttggtcatgagcttgcgccgtcccgtcaagtcagcgtaatgctctgcttttagaaaaactcatcgagcatcaaatgaaactgcaatttattcatatcaggattatcaataccatatttttgaaaaagccgtttctgtaatgaaggagaaaactcaccgaggcagttccataggatggcaagatcctggtatcggtctgcgattccgactcgtccaacatcaatacaacctattaatttcccctcgtcaaaaataaggttatcaagtgagaaatcaccatgagtgacgactgaatccggtgagaatggcaaaagtttatgcatttctttccagacttgttcaacaggccagccattacgctcgtcatcaaaatcactcgcatcaaccaaaccgttattcattcgtgattgcgcctgagcgaggcgaaatacgcgatcgctgttaaaaggacaattacaaacaggaatcgagtgcaaccggcgcaggaacactgccagcgcatcaacaatattttcacctgaatcaggatattcttctaatacctggaacgctgtttttccggggatcgcagtggtgagtaaccatgcatcatcaggagtacggataaaatgcttgatggtcggaagtggcataaattccgtcagccagtttagtctgaccatctcatctgtaacatcattggcaacgctacctttgccatgtttcagaaacaactctggcgcatcgggcttcccatacaagcgatagattgtcgcacctgattgcccgacattatcgcgagcccatttatacccatataaatcagcatccatgttggaatttaatcgcggcctcgacgtttcccgttgaatatggctcatattcttcctttttcaatattattgaagcatttatcagggttattgtctcatgagcggatacatatttgaatgtatttagaaaaataaacaaataggggtcagtgttacaaccaattaaccaattctgacatgtccatgtatttaaattaattaatgcttatacaatcttcctgtttttggggcttttctgattatcaaccggggtacatatgattgacatgctagttttacgattaccgttcatcgccttaattaatt

SEQ ID NO: 194 - DNA, 6317 bp, synthetic construct
  source 1..6317: mol_type = other DNA
ggccactccctctctgcgcgctcgctcgctcactgaggccgcccgggcaaagcccgggcgtcgggcgacctttggtcgcccggcctcagtgagcgagcgagcgcgcagagagggagtggccaactccatcactaggggttcctcagatctatgtgagcaaacagcagcatgctggggaaaaatttagggttagggttagggttagggaaaaatttagggttagggttagggttagggaaaaatttagggttagggttagggttagggaaaaacgcgtggtacccgttacataacttacggtaaatggcccgcctggctgaccgcccaacgacccccgcccattgacgtcaatagtaacgccaatagggactttccattgacgtcaatgggtggagtatttacggtaaactgcccacttggcagtacatcaagtgtatcatatgccaagtacgccccctattgacgtcaatgacggtaaatggcccgcctggcattgtgcccagtacatgaccttatgggactttcctacttggcagtacatctacgtattagtcatcgctattaccatggtcgaggtgagccccacgttctgcttcactctccccatctcccccccctccccacccccaattttgtatttatttattttttaattattttgtgcagcgatgggggcggggggggggggggggcgcgcgccaggcggggcggggcggggcgaggggcggggcggggcgaggcggagaggtgcggcggcagccaatcagagcggcgcgctccgaaagtttccttttatggcgaggcggcggcggcggcggccctataaaaagcgaagcgcgcggcgggcgggagtcgctgcgacgctgccttcgccccgtgccccgctccgccgccgcctcgcgccgcccgccccggctctgactgaccgcgttactcccacaggtgagcgggcgggacggcccttctcctccgggctgtaattagctgagctttaagggaaggttggttggtggggtattaatctttaattacctggagcacctgcctgaaatcactttttttcaggttggaccggtccaccatgtggcgactacgtcgggccgctgtggcctgtgaggtctgccagtctttagtgaaacacagctctggaataaaaggaagtttaccactacaaaaactacatctggtttcacgaagcatttatcattcacatcatcctaccttaaagcttcaacgaccccaattaaggacatcctttcagcagttctcttctctgacaaaccttcctttacgtaaactgaaattctctccaattaaatatggctaccagcctcgcaggaatttttggccagcaagattagctacgagactcttaaaacttcgctatctcatactaggatcggctgttgggggtggctacacagccaaaaagacttttgatcagtggaaagatatgataccggaccttagtgaatataaatggattgtgcctgacattgtgtgggaaattgatgagtatatcgattttgagaaaattagaaaagcccttcctagttcagaagaccttgtaaagttagcaccagactttgacaagattgttgaaagccttagcttattgaaggacttttttacctcaggttctccggaagaaagtgacaagcattttagaaaggtgtcagacaaagagaaaattgaccaacttcaggaagaacttctgcacactcagttgaagtatcagagaatcttggaacgattagaaaaggagaacaaagaattgagaaaattagtattgcagaaagatgacaaaggcattcatcatagaaagcttaagaaatctttgattgacatgtattctgaagttcttgatgttctctctgattatgatgccagttataatacgcaagatcatctgccacgggttgttgtggttggagatcagagtgctggaaagactagtgtgttggaaatgattgcccaagctcgaatattcccaagaggatctggggagatgatgacacgttctccagttaaggtgactctgagtgaaggtcctcaccatgtggccctatttaaagatagttctcgggagtttgatcttaccaaagaagaggatcttgcagcattaagacatgaaatagaacttcgaatgaggaaaaatgtgaaagaaggctgtaccgttagccctgagaccatatccttaaatgtaaaaggccctggactacagaggatggtgcttgttgacttaccaggtgtgattaatactgtgacatcaggcatggctcctgacacaaaggaaactattttcagtatcagcaaagcttacatgcagaatcctaatgccatcatactgtgtattcaagatggatctgtggatgctgaacgcagtattgttacagacttggtcagtcaaatggaccctcatggaaggagaaccatattcgttttgaccaaagtagacctggcagagaaaaatgtagccagtccaagcaggattcagcagataattgaaggaaagctcttcccaatgaaagctttaggttattttgctgttgtaacaggaaaagggaacagctctgaaagcattgaagctataagagaatatgaagaagagttttttcagaattcaaagctcctaaagacaagcatgctaaaggcacaccaagtgactacaagaaatttaagccttgcagtatcagactgcttttggaaaatggtacgagagtctgttgaacaacaggctgatagtttcaaagcaacacgttttaaccttgaaactgaatggaagaataactatcctcgcctgcgggaacttgaccggaatgaactatttgaaaaagctaaaaatgaaatccttgatgaagttatcagtctgagccaggttacaccaaaacattgggaggaaatccttcaacaatctttgtgggaaagagtatcaactcatgtgattgaaaacatctaccttccagctgcgcagaccatgaattcaggaacttttaacaccacagtggatatcaagcttaaacagtggactgataaacaacttcctaataaagcagtagaggttgcttgggagaccctacaagaagaattttcccgctttatgacagaaccgaaagggaaagagcatgatgacatatttgataaacttaaagaggctgttaaggaagaaagtattaaacgacacaagtggaatgactttgcggaggacagcttgagggttattcaacacaatgctttggaagaccgatccatatctgataaacagcaatgggatgcagctatttattttatggaagaggctctgcaggctcgtctcaaggatactgaaaatgcaattgaaaacatggtgggtccagactggaaaaagaggtggttatactggaagaatcggacccaagaacagtgtgttcacaatgaaaccaagaatgaattggagaagatgttgaaatgtaatgaggagcacccagcttatcttgcaagtgatgaaataaccacagtccggaagaaccttgaatcccgaggagtagaagtagatccaagcttgattaaggatacttggcatcaagtttatagaagacattttttaaaaacagctctaaaccattgtaacctttgtcgaagaggtttttattactaccaaaggcattttgtagattctgagttggaatgcaatgatgtggtcttgttttggcgtatacagcgcatgcttgctatcaccgcaaatactttaaggcaacaacttacaaatactgaagttaggcgattagagaaaaatgttaaagaggtattggaagattttgctgaagatggtgagaagaagattaaattgcttactggtaagcgcgttcaactggcggaagacctcaagaaagttagagaaattcaagaaaaacttgatgctttcattgaagctcttcatcaggagaaagactacaaagaccatgacggtgattataaagatcatgacatcgattacaaggatgacgatgacaagtaatctagagcctcgactgtgccttctagttgccagccatctgttgtttgcccctcccccgtgccttccttgaccctggaaggtgccactcccactgtcctttcctaataaaatgaggaaattgcatcgcattgtctgagtaggtgtcattctattctggggggtggggtggggcaggacagcaagggggaggattgggaagagaatagcaggcatgctggggatcctttttccctaaccctaaccctaaccctaaatttttccctaaccctaaccctaaccctaaatttttccctaaccctaaccctaaccctaaatttttgcggccgcaggaacccctagtgatggagttggccactccctctctgcgcgctcgctcgctcactgaggccgggcgaccaaaggtcgcccgacgcccgggctttgcccgggcggcctcagtgagcgagcgagcgcgcagctgcctgcaggacatggtttaaacatgtgagcaaaaggccagcaaaaggccaggaaccgtaaaaaggccgcgttgctggcgtttttccataggctccgcccccctgacgagcatcacaaaaatcgacgctcaagtcagaggtggcgaaacccgacaggactataaagataccaggcgtttccccctggaagctccctcgtgcgctctcctgttccgaccctgccgcttaccggatacctgtccgcctttctcccttcgggaagcgtggcgctttctcatagctcacgctgtaggtatctcagttcggtgtaggtcgttcgctccaagctgggctgtgtgcacgaaccccccgttcagcccgaccgctgcgccttatccggtaactatcgtcttgagtccaacccggtaagacacgacttatcgccactggcagcagccactggtaacaggattagcagagcgaggtatgtaggcggtgctacagagttcttgaagtggtgggctaactacggctacactagaagaacagtatttggtatctgcgctctgctgaagccagttaccttcggaaaaagagttggtagctcttgatccggcaaacaaaccaccgctggtagcggtggtttttttgtttgcaagcagcagattacgcgcagaaaaaaaggatctcaagaagatcctttgatcttttctacggggtctgacgctcagtggaacgacgcgcgcgtaactcacgttaagggattttggtcatgagcttgcgccgtcccgtcaagtcagcgtaatgctctgcttttagaaaaactcatcgagcatcaaatgaaactgcaatttattcatatcaggattatcaataccatatttttgaaaaagccgtttctgtaatgaaggagaaaactcaccgaggcagttccataggatggcaagatcctggtatcggtctgcgattccgactcgtccaacatcaatacaacctattaatttcccctcgtcaaaaataaggttatcaagtgagaaatcaccatgagtgacgactgaatccggtgagaatggcaaaagtttatgcatttctttccagacttgttcaacaggccagccattacgctcgtcatcaaaatcactcgcatcaaccaaaccgttattcattcgtgattgcgcctgagcgaggcgaaatacgcgatcgctgttaaaaggacaattacaaacaggaatcgagtgcaaccggcgcaggaacactgccagcgcatcaacaatattttcacctgaatcaggatattcttctaatacctggaacgctgtttttccggggatcgcagtggtgagtaaccatgcatcatcaggagtacggataaaatgcttgatggtcggaagtggcataaattccgtcagccagtttagtctgaccatctcatctgtaacatcattggcaacgctacctttgccatgtttcagaaacaactctggcgcatcgggcttcccatacaagcgatagattgtcgcacctgattgcccgacattatcgcgagcccatttatacccatataaatcagcatccatgttggaatttaatcgcggcctcgacgtttcccgttgaatatggctcatattcttcctttttcaatattattgaagcatttatcagggttattgtctcatgagcggatacatatttgaatgtatttagaaaaataaacaaataggggtcagtgttacaaccaattaaccaattctgacatgtccatgtatttaaattaattaatgcttatacaatcttcctgtttttggggcttttctgattatcaaccggggtacatatgattgacatgctagttttacgattaccgttcatcgccttaattaatt

SEQ ID NO: 195 - DNA, 6461 bp, synthetic construct
  source 1..6461: mol_type = other DNA
ggccactccctctctgcgcgctcgctcgctcactgaggccgcccgggcaaagcccgggcgtcgggcgacctttggtcgcccggcctcagtgagcgagcgagcgcgcagagagggagtggccaactccatcactaggggttcctcagatctatgtgagcaaacagcagcatgctggggaaaaatttagggttagggttagggttagggaaaaatttagggttagggttagggttagggaaaaatttagggttagggttagggttagggaaaaacgcgtggtacccgttacataacttacggtaaatggcccgcctggctgaccgcccaacgacccccgcccattgacgtcaatagtaacgccaatagggactttccattgacgtcaatgggtggagtatttacggtaaactgcccacttggcagtacatcaagtgtatcatatgccaagtacgccccctattgacgtcaatgacggtaaatggcccgcctggcattgtgcccagtacatgaccttatgggactttcctacttggcagtacatctacgtattagtcatcgctattaccatggtcgaggtgagccccacgttctgcttcactctccccatctcccccccctccccacccccaattttgtatttatttattttttaattattttgtgcagcgatgggggcggggggggggggggggcgcgcgccaggcggggcggggcggggcgaggggcggggcggggcgaggcggagaggtgcggcggcagccaatcagagcggcgcgctccgaaagtttccttttatggcgaggcggcggcggcggcggccctataaaaagcgaagcgcgcggcgggcgggagtcgctgcgacgctgccttcgccccgtgccccgctccgccgccgcctcgcgccgcccgccccggctctgactgaccgcgttactcccacaggtgagcgggcgggacggcccttctcctccgggctgtaattagctgagctttaagggaaggttggttggtggggtattaatctttaattacctggagcacctgcctgaaatcactttttttcaggttggaccggtccaccatgtggcgactacgtcgggccgctgtggcctgtgaggtctgccagtctttagtgaaacacagctctggaataaaaggaagtttaccactacaaaaactacatctggtttcacgaagcatttatcattcacatcatcctaccttaaagcttcaacgaccccaattaaggacatcctttcagcagttctcttctctgacaaaccttcctttacgtaaactgaaattctctccaattaaatatggctaccagcctcgcaggaatttttggccagcaagattagctacgagactcttaaaacttcgctatctcatactaggatcggctgttgggggtggctacacagccaaaaagacttttgatcagtggaaagatatgataccggaccttagtgaatataaatggattgtgcctgacattgtgtgggaaattgatgagtatatcgattttgagaaaattagaaaagcccttcctagttcagaagaccttgtaaagttagcaccagactttgacaagattgttgaaagccttagcttattgaaggacttttttacctcaggttctccggaagaaacggcgtttagagcaacagatcgtggatctgaaagtgacaagcattttagaaagggtctgcttggtgagctcattctcttacaacaacaaattcaagagcatgaagaggaagcgcgcagagccgctggccaatatagcacgagctatgcccaacagaagcgcaaggtgtcagacaaagagaaaattgaccaacttcaggaagaacttctgcacactcagttgaagtatcagagaatcttggaacgattagaaaaggagaacaaagaattgagaaaattagtattgcagaaagatgacaaaggcattcatcatagaaagcttaagaaatctttgattgacatgtattctgaagttcttgatgttctctctgattatgatgccagttataatacgcaagatcatctgccacgggttgttgtggttggagatcagagtgctggaaagactagtgtgttggaaatgattgcccaagctcgaatattcccaagaggatctggggagatgatgacacgttctccagttaaggtgactctgagtgaaggtcctcaccatgtggccctatttaaagatagttctcgggagtttgatcttaccaaagaagaggatcttgcagcattaagacatgaaatagaacttcgaatgaggaaaaatgtgaaagaaggctgtaccgttagccctgagaccatatccttaaatgtaaaaggccctggactacagaggatggtgcttgttgacttaccaggtgtgattaatactgtgacatcaggcatggctcctgacacaaaggaaactattttcagtatcagcaaagcttacatgcagaatcctaatgccatcatactgtgtattcaagatggatctgtggatgctgaacgcagtattgttacagacttggtcagtcaaatggaccctcatggaaggagaaccatattcgttttgaccaaagtagacctggcagagaaaaatgtagccagtccaagcaggattcagcagataattgaaggaaagctcttcccaatgaaagctttaggttattttgctgttgtaacaggaaaagggaacagctctgaaagcattgaagctataagagaatatgaagaagagttttttcagaattcaaagctcctaaagacaagcatgctaaaggcacaccaagtgactacaagaaatttaagccttgcagtatcagactgcttttggaaaatggtacgagagtctgttgaacaacaggctgatagtttcaaagcaacacgttttaaccttgaaactgaatggaagaataactatcctcgcctgcgggaacttgaccggaatgaactatttgaaaaagctaaaaatgaaatccttgatgaagttatcagtctgagccaggttacaccaaaacattgggaggaaatccttcaacaatctttgtgggaaagagtatcaactcatgtgattgaaaacatctaccttccagctgcgcagaccatgaattcaggaacttttaacaccacagtggatatcaagcttaaacagtggactgataaacaacttcctaataaagcagtagaggttgcttgggagaccctacaagaagaattttcccgctttatgacagaaccgaaagggaaagagcatgatgacatatttgataaacttaaagaggctgttaaggaagaaagtattaaacgacacaagtggaatgactttgcggaggacagcttgagggttattcaacacaatgctttggaagaccgatccatatctgataaacagcaatgggatgcagctatttattttatggaagaggctctgcaggctcgtctcaaggatactgaaaatgcaattgaaaacatggtgggtccagactggaaaaagaggtggttatactggaagaatcggacccaagaacagtgtgttcacaatgaaaccaagaatgaattggagaagatgttgaaatgtaatgaggagcacccagcttatcttgcaagtgatgaaataaccacagtccggaagaaccttgaatcccgaggagtagaagtagatccaagcttgattaaggatacttggcatcaagtttatagaagacattttttaaaaacagctctaaaccattgtaacctttgtcgaagaggtttttattactaccaaaggcattttgtagattctgagttggaatgcaatgatgtggtcttgttttggcgtatacagcgcatgcttgctatcaccgcaaatactttaaggcaacaacttacaaatactgaagttaggcgattagagaaaaatgttaaagaggtattggaagattttgctgaagatggtgagaagaagattaaattgcttactggtaagcgcgttcaactggcggaagacctcaagaaagttagagaaattcaagaaaaacttgatgctttcattgaagctcttcatcaggagaaagactacaaagaccatgacggtgattataaagatcatgacatcgattacaaggatgacgatgacaagtaatctagagcctcgactgtgccttctagttgccagccatctgttgtttgcccctcccccgtgccttccttgaccctggaaggtgccactcccactgtcctttcctaataaaatgaggaaattgcatcgcattgtctgagtaggtgtcattctattctggggggtggggtggggcaggacagcaagggggaggattgggaagagaatagcaggcatgctggggatcctttttccctaaccctaaccctaaccctaaatttttccctaaccctaaccctaaccctaaatttttccctaaccctaaccctaaccctaaatttttgcggccgcaggaacccctagtgatggagttggccactccctctctgcgcgctcgctcgctcactgaggccgggcgaccaaaggtcgcccgacgcccgggctttgcccgggcggcctcagtgagcgagcgagcgcgcagctgcctgcaggacatggtttaaacatgtgagcaaaaggccagcaaaaggccaggaaccgtaaaaaggccgcgttgctggcgtttttccataggctccgcccccctgacgagcatcacaaaaatcgacgctcaagtcagaggtggcgaaacccgacaggactataaagataccaggcgtttccccctggaagctccctcgtgcgctctcctgttccgaccctgccgcttaccggatacctgtccgcctttctcccttcgggaagcgtggcgctttctcatagctcacgctgtaggtatctcagttcggtgtaggtcgttcgctccaagctgggctgtgtgcacgaaccccccgttcagcccgaccgctgcgccttatccggtaactatcgtcttgagtccaacccggtaagacacgacttatcgccactggcagcagccactggtaacaggattagcagagcgaggtatgtaggcggtgctacagagttcttgaagtggtgggctaactacggctacactagaagaacagtatttggtatctgcgctctgctgaagccagttaccttcggaaaaagagttggtagctcttgatccggcaaacaaaccaccgctggtagcggtggtttttttgtttgcaagcagcagattacgcgcagaaaaaaaggatctcaagaagatcctttgatcttttctacggggtctgacgctcagtggaacgacgcgcgcgtaactcacgttaagggattttggtcatgagcttgcgccgtcccgtcaagtcagcgtaatgctctgcttttagaaaaactcatcgagcatcaaatgaaactgcaatttattcatatcaggattatcaataccatatttttgaaaaagccgtttctgtaatgaaggagaaaactcaccgaggcagttccataggatggcaagatcctggtatcggtctgcgattccgactcgtccaacatcaatacaacctattaatttcccctcgtcaaaaataaggttatcaagtgagaaatcaccatgagtgacgactgaatccggtgagaatggcaaaagtttatgcatttctttccagacttgttcaacaggccagccattacgctcgtcatcaaaatcactcgcatcaaccaaaccgttattcattcgtgattgcgcctgagcgaggcgaaatacgcgatcgctgttaaaaggacaattacaaacaggaatcgagtgcaaccggcgcaggaacactgccagcgcatcaacaatattttcacctgaatcaggatattcttctaatacctggaacgctgtttttccggggatcgcagtggtgagtaaccatgcatcatcaggagtacggataaaatgcttgatggtcggaagtggcataaattccgtcagccagtttagtctgaccatctcatctgtaacatcattggcaacgctacctttgccatgtttcagaaacaactctggcgcatcgggcttcccatacaagcgatagattgtcgcacctgattgcccgacattatcgcgagcccatttatacccatataaatcagcatccatgttggaatttaatcgcggcctcgacgtttcccgttgaatatggctcatattcttcctttttcaatattattgaagcatttatcagggttattgtctcatgagcggatacatatttgaatgtatttagaaaaataaacaaataggggtcagtgttacaaccaattaaccaattctgacatgtccatgtatttaaattaattaatgcttatacaatcttcctgtttttggggcttttctgattatcaaccggggtacatatgattgacatgctagttttacgattaccgttcatcgccttaattaatt

SEQ ID NO: 196 - DNA, 295 bp, synthetic construct
  source 1..295: mol_type = other DNA
gggccccagaagcctggtggttgtttgtccttctcaggggaaaagtgaggcggccccttggaggaaggggccgggcagaatgatctaatcggattccaagcagctcaggggattgtctttttctagcaccttcttgccactcctaagcgtcctccgtgaccccggctgggatttagcctggtgctgtgtcagccccgggctcccaggggcttcccagtggtccccaggaaccctcgacagggccagggcgtctctctcgtccagcaagggcagggacgggccacaggccaagggc

SEQ ID NO: 197 - DNA, 319 bp, synthetic construct
  source 1..319: mol_type = other DNA
agttaggggaccttctcctcccttttcctggatcctgagtacctctcctccctgacctcaggcttcctcctagtgtcaccttggcccctcttagaagccaattaggccctcagtttctgcagcggggattaatatgattatgaacacccccaatctcccagatgctgattcagccaggagcttaggagggggaggtcactttataagggtctgggggggtcagaacccagagtcatccagctggagccctgagtggctgagctcaggccttcgcagcattcttgggtgggagcagccacgggtcagccacaagggccac

SEQ ID NO: 198 - DNA, 136 bp, synthetic construct; identical to SEQ ID NO: 160
  source 1..136: mol_type = other DNA

SEQ ID NO: 199 - DNA, 240 bp, synthetic construct
  source 1..240: mol_type = other DNA
tggaggcagaggagaaggcccaggcttcccagcagggctaaggatatgcaaggagtgcattcatccggaggtgttggcagcatcccagccccaccccattctcatcgtaaatcaggctcacttccattggctgcatacggtggagtgatgtgaccatatgtcacttgagcattacacaaatcctaatgagctaaaaatatgtttgttttagctaattgacctctttggccttcataaagc

SEQ ID NO: 200 - DNA, 123 bp, synthetic construct
  source 1..123: mol_type = other DNA
gtgagcgggcgggacggcccttctcctccgggctgtaattagctgagctttaagggaaggttggttggtggggtattaatctttaattacctggagcacctgcctgaaatcactttttttcag

SEQ ID NO: 201 - DNA, 225 bp, synthetic construct
  source 1..225: mol_type = other DNA
ctgtgccttctagttgccagccatctgttgtttgcccctcccccgtgccttccttgaccctggaaggtgccactcccactgtcctttcctaataaaatgaggaaattgcatcgcattgtctgagtaggtgtcattctattctggggggtggggtggggcaggacagcaagggggaggattgggaagacaatagcaggcatgctggggatgcggtgggctctatgg

SEQ ID NO: 202 - DNA, 85 bp, synthetic construct
  source 1..85: mol_type = other DNA
ccctaaccctaaccctaaccctaaatttttccctaaccctaaccctaaccctaaatttttccctaaccctaaccctaaccctaaa

SEQ ID NO: 203 - DNA, 85 bp, synthetic construct
  source 1..85: mol_type = other DNA
tttagggttagggttagggttagggaaaaatttagggttagggttagggttagggaaaaatttagggttagggttagggttaggg

SEQ ID NO: 204 - DNA, 3888 bp, synthetic construct
  source 1..3888: mol_type = other DNA
ctgcgcgctcgctcgctcactgaggccgcccgggcaaagcccgggcgtcgggcgacctttggtcgcccggcctcagtgagcgagcgagcgcgcagagagggagtggggttcggtacctggaggcagaggagaaggcccaggcttcccagcagggctaaggatatgcaaggagtgcattcatccggaggtgttggcagcatcccagccccaccccattctcatcgtaaatcaggctcacttccattggctgcatacggtggagtgatgtgaccatatgtcacttgagcattacacaaatcctaatgagctaaaaatatgtttgttttagctaattgacctctttggccttcataaagcgggccccagaagcctggtggttgtttgtccttctcaggggaaaagtgaggcggccccttggaggaaggggccgggcagaatgatctaatcggattccaagcagctcaggggattgtctttttctagcaccttcttgccactcctaagcgtcctccgtgaccccggctgggatttagcctggtgctgtgtcagccccgggctcccaggggcttcccagtggtccccaggaaccctcgacagggccagggcgtctctctcgtccagcaagggcagggacgggccacaggccaagggcaccggagccccggctctgactgaccgcgttactcccacaggtgagcgggcggtttaagggaaggttggttggtggggtattaatctttaattacctggagcacctgcctgaaatcactttttttcaggttggaccggtccaccatgagccgcaagatagaaggctttttgttattacttctctttggctatgaagccacattgggattatcgtctaccgaggatgaaggcgaggacccctggtatcaaaaagcatgcgatgaaggcgaggacccctggtatcaaaaagcatgcaagtgcgattgccaaggaggacccaatgctctgtggtctgcaggtgccacctccttggactgtataccagaatgcccatatcacaagcctctgggtttcgagtcaggggaggtcacaccggaccagatcacctgctctaacccggagcagtatgtgggctggtattcttcgtggactgcaaacaaggcccggctcaacagtcaaggctttgggtgtgcctggctctccaagttccaggacagtagccagtggttacagatagatctgaaggagatcaaagtgatttcagggatcctcacccaggggcgctgtgacatcgatgagtggatgaccaagtacagcgtgcagtacaggaccgatgagcgcctgaactggatttactacaaggaccagactggaaacaaccgggtcttctatggcaactcggaccgcacctccacggttcagaacctgctgcggccccccatcatctcccgcttcatccgcctcatcccgctgggctggcacgtccgcattgccatccggatggagctgctggagtgcgtcagcaagtgtgcctgaagcttctagagcctcgactgtgccttctagttgccagccatctgttgtttgcccctcccccgtgccttccttgaccctggaaggtgccactcccactgtcctttcctaataaaatgaggaaattgcatcgcattgtctgagtaggtgtcattctattctggggggtggggtggggcaggacagcaagggggaggattgggaagagaatagcaggcatgctggggaaaaatttagggttagggttagggttagggaaaaatttagggttagggttagggttagggaaaaatttagggttagggttagggttagggaaaaacgcgtaggaacccctagtgatggagttggccactccctctctgcgcgctcgctcgctcactgaggccgggcgaccaaaggtcgcccgacgcccgggctttgcccgggcggcctcagtgagcgagcgagcgcgcagctggcgtaatagcgaagaggcccgcaccgatcgcccttcccaacagttgcgcaaattaattaaggcgatgaacggtaatcgtaaaactagcatgtcaatcatatgtaccccggttgataatcagaaaagccccaaaaacaggaagattgtataagcattaattaatttaaatacatggacatgtcagaattggttaattggttgtaacactgacccctatttgtttatttttctaaatacattcaaatatgtatccgctcatgagacaataaccctgataaatgcttcaataatattgaaaaaggaagaatatgagccatattcaacgggaaacgtcgaggccgcgattaaattccaacatggatgctgatttatatgggtataaatgggctcgcgataatgtcgggcaatcaggtgcgacaatctatcgcttgtatgggaagcccgatgcgccagagttgtttctgaaacatggcaaaggtagcgttgccaatgatgttacagatgagatggtcagactaaactggctgacggaatttatgccacttccgaccatcaagcattttatccgtactcctgatgatgcatggttactcaccactgcgatccccggaaaaacagcgttccaggtattagaagaatatcctgattcaggtgaaaatattgttgatgcgctggcagtgttcctgcgccggttgcactcgattcctgtttgtaattgtccttttaacagcgatcgcgtatttcgcctcgctcaggcgcaatcacgaatgaataacggtttggttgatgcgagtgattttgatgacgagcgtaatggctggcctgttgaacaagtctggaaagaaatgcataaacttttgccattctcaccggattcagtcgtcactcatggtgatttctcacttgataaccttatttttgacgaggggaaattaataggttgtattgatgttggacgagtcggaatcgcagaccgataccaggatcttgccatcctatggaactgcctcggtgagttttctccttcattacagaaacggctttttcaaaaatatggtattgataatcctgatatgaataaattgcagtttcatttgatgctcgatgagtttttctaaaagcagagcattacgctgacttgacgggacggcgcaagctcatgaccaaaatcccttaacgtgagttacgcgcgcgtcgttccactgagcgtcagaccccgtagaaaagatcaaaggatcttcttgagatcctttttttctgcgcgtaatctgctgcttgcaaacaaaaaaaccaccgctaccagcggtggtttgtttgccggatcaagagctaccaactctttttccgaaggtaactggcttcagcagagcgcagataccaaatactgttcttctagtgtagccgtagttagcccaccacttcaagaactctgtagcaccgcctacatacctcgctctgctaatcctgttaccagtggctgctgccagtggcgataagtcgtgtcttaccgggttggactcaagacgatagttaccggataaggcgcagcggtcgggctgaacggggggttcgtgcacacagcccagcttggagcgaacgacctacaccgaactgagatacctacagcgtgagctatgagaaagcgccacgcttcccgaagggagaaaggcggacaggtatccggtaagcggcagggtcggaacaggagagcgcacgagggagcttccagggggaaacgcctggtatctttatagtcctgtcgggtttcgccacctctgacttgagcgtcgatttttgtgatgctcgtcaggggggcggagcctatggaaaaacgccagcaacgcggcctttttacggttcctggccttttgctggccttttgctcacatgtttaaaccatgcacttggccgattcattaatgcag

SEQ ID NO: 205 - DNA, 5638 bp, synthetic construct
  source 1..5638: mol_type = other DNA
ctgcgcgctcgctcgctcactgaggccgcccgggcaaagcccgggcgtcgggcgacctttggtcgcccggcctcagtgagcgagcgagcgcgcagagagggagtggggttcggtacccgttacataacttacggtaaatggcccgcctggctgaccgcccaacgacccccgcccattgacgtcaatagtaacgccaatagggactttccattgacgtcaatgggtggagtatttacggtaaactgcccacttggcagtacatcaagtgtatcatatgccaagtacgccccctattgacgtcaatgacggtaaatggcccgcctggcattgtgcccagtacatgaccttatgggactttcctacttggcagtacatctacgtattagtcatcgctattaccatggtcgaggtgagccccacgttctgcttcactctccccatctcccccccctccccacccccaattttgtatttatttattttttaattattttgtgcagcgatgggggcggggggggggggggggcgcgcgccaggcggggcggggcggggcgaggggcggggcggggcgaggcggagaggtgcggcggcagccaatcagagcggcgcgctccgaaagtttccttttatggcgaggcggcggcggcggcggccctataaaaagcgaagcgcgcggcgggcgggagtcgctgcgacgctgccttcgccccgtgccccgctccgccgccgcctcgcgccgcccgccccggctctgactgaccgcgttactcccacaggtgagcgggcgggacggcccttctcctccgggctgtaattagctgagctttaagggaaggttggttggtggggtattaatctttaattacctggagcacctgcctgaaatcactttttttcaggttggaccggtccaccatgagccgcaagatagaaggctttttgttattacttctctttggctatgaagccacattgggattatcgtctaccgaggatgaaggcgaggacccctggtatcaaaaagcatgcaagtgcgattgccaaggaggacccaatgctctgtggtctgcaggtgccacctccttggactgtataccagaatgcccatatcacaagcctctgggtttcgagtcaggggaggtcacaccggaccagatcacctgctctaacccggagcagtatgtgggctggtattcttcgtggactgcaaacaaggcccggctcaacagtcaaggctttgggtgtgcctggctctccaagttccaggacagtagccagtggttacagatagatctgaaggagatcaaagtgatttcagggatcctcacccaggggcgctgtgacatcgatgagtggatgaccaagtacagcgtgcagtacaggaccgatgagcgcctgaactggatttactacaaggaccagactggaaacaaccgggtcttctatggcaactcggaccgcacctccacggttcagaacctgctgcggccccccatcatctcccgcttcatccgcctcatcccgctgggctggcacgtccgcattgccatccggatggagctgctggagtgcgtcagcaagtgtgcctgaagcttctagagcctcgactgtgccttctagttgccagccatctgttgtttgcccctcccccgtgccttccttgaccctggaaggtgccactcccactgtcctttcctaataaaatgaggaaattgcatcgcattgtctgagtaggtgtcattctattctggggggtggggtggggcaggacagcaagggggaggattgggaagagaatagcaggcatgctggggaaaaatttagggttagggttagggttagggaaaaatttagggttagggttagggttagggaaaaatttagggttagggttagggttagggaaaaacgcgtaggaacccctagtgatggagttggccactccctctctgcgcgctcgctcgctcactgaggccgggcgaccaaaggtcgcccgacgcccgggctttgcccgggcggcctcagtgagcgagcgagcgcgcagctggcgtaatagcgaagaggcccgcaccgatcgcccttcccaacagttgcgcagcctgaatggcgaatggcgattccgttgcaatggctggcggtaatattgttctggatattaccagcaaggccgatagtttgagttcttctactcaggcaagtgatgttattactaatcaaagaagtattgcgacaacggttaatttgcgtgatggacagactcttttactcggtggcctcactgattataaaaacacttctcaggattctggcgtaccgttcctgtctaaaatccctttaatcggcctcctgtttagctcccgctctgattctaacgaggaaagcacgttatacgtgctcgtcaaagcaaccatagtacgcgccctgtagcggcgcattaagcgcggcgggtgtggtggttacgcgcagcgtgaccgctacacttgccagcgccctagcgcccgctcctttcgctttcttcccttcctttctcgccacgttcgccggctttccccgtcaagctctaaatcgggggctccctttagggttccgatttagtgctttacggcacctcgaccccaaaaaacttgattagggtgatggttcacgtagtgggccatcgccctgatagacggtttttcgccctttgacgttggagtccacgttctttaatagtggactcttgttccaaactggaacaacactcaaccctatctcggtctattcttttgatttataagggattttgccgatttcggcctattggttaaaaaatgagctgatttaacaaaaatttaacgcgaattttaacaaaatattaacgcttacaatttaaatatttgcttatacaatcttcctgtttttggggcttttctgattatcaaccggggtacatatgattgacatgctagttttacgattaccgttcatcgattctcttgtttgctccagactctcaggcaatgacctgatagcctttgtagagacctctcaaaaatagctaccctctccggcatgaatttatcagctagaacggttgaatatcatattgatggtgatttgactgtctccggcctttctcacccgtttgaatctttacctacacattactcaggcattgcatttaaaatatatgagggttctaaaaatttttatccttgcgttgaaataaaggcttctcccgcaaaagtattacagggtcataatgtttttggtacaaccgatttagctttatgctctgaggctttattgcttaattttgctaattctttgccttgcctgtatgatttattggatgttggaatcgcctgatgcggtattttctccttacgcatctgtgcggtatttcacaccgcatatggtgcactctcagtacaatctgctctgatgccgcatagttaagccagccccgacacccgccaacacccgctgacgcgccctgacgggcttgtctgctcccggcatccgcttacagacaagctgtgaccgtctccgggagctgcatgtgtcagaggttttcaccgtcatcaccgaaacgcgcgagacgaaagggcctcgtgatacgcctatttttataggttaatgtcatgataataatggtttcttagacgtcaggtggcacttttcggggaaatgtgcgcggaacccctatttgtttatttttctaaatacattcaaatatgtatccgctcatgagacaataaccctgataaatgcttcaataatattgaaaaaggaagagtatgagtattcaacatttccgtgtcgcccttattcccttttttgcggcattttgccttcctgtttttgctcacccagaaacgctggtgaaagtaaaagatgctgaagatcagttgggtgcacgagtgggttacatcgaactggatctcaacagcggtaagatccttgagagttttcgccccgaagaacgttttccaatgatgagcacttttaaagttctgctatgtggcgcggtattatcccgtattgacgccgggcaagagcaactcggtcgccgcatacactattctcagaatgacttggttgagtactcaccagtcacagaaaagcatcttacggatggcatgacagtaagagaattatgcagtgctgccataaccatgagtgataacactgcggccaacttacttctgacaacgatcggaggaccgaaggagctaaccgcttttttgcacaacatgggggatcatgtaactcgccttgatcgttgggaaccggagctgaatgaagccataccaaacgacgagcgtgacaccacgatgcctgtagcaatggcaacaacgttgcgcaaactattaactggcgaactacttactctagcttcccggcaacaattaatagactggatggaggcggataaagttgcaggaccacttctgcgctcggcccttccggctggctggtttattgctgataaatctggagccggtgagcgtgggtctcgcggtatcattgcagcactggggccagatggtaagccctcccgtatcgtagttatctacacgacggggagtcaggcaactatggatgaacgaaatagacagatcgctgagataggtgcctcactgattaagcattggtaactgtcagaccaagtttactcatatatactttagattgatttaaaacttcatttttaatttaaaaggatctaggtgaagatcctttttgataatctcatgaccaaaatcccttaacgtgagttttcgttccactgagcgtcagaccccgtagaaaagatcaaaggatcttcttgagatcctttttttctgcgcgtaatctgctgcttgcaaacaaaaaaaccaccgctaccagcggtggtttgtttgccggatcaagagctaccaactctttttccgaaggtaactggcttcagcagagcgcagataccaaatactgtccttctagtgtagccgtagttaggccaccacttcaagaactctgtagcaccgcctacatacctcgctctgctaatcctgttaccagtggctgctgccagtggcgataagtcgtgtcttaccgggttggactcaagacgatagttaccggataaggcgcagcggtcgggctgaacggggggttcgtgcacacagcccagcttggagcgaacgacctacaccgaactgagatacctacagcgtgagctatgagaaagcgccacgcttcccgaagggagaaaggcggacaggtatccggtaagcggcagggtcggaacaggagagcgcacgagggagcttccagggggaaacgcctggtatctttatagtcctgtcgggtttcgccacctctgacttgagcgtcgatttttgtgatgctcgtcaggggggcggagcctatggaaaaacgccagcaacgcggcctttttacggttcctggccttttgctggccttttgctcacatgttctttcctgcgttatcccctgattctgtggataaccgtattaccgcctttgagtgagctgataccgctcgccgcagccgaacgaccgagcgcagcgagtcagtgagcgaggaagcggaagagcgcccaatacgcaaaccgcctctccccgcgcgttggccgattcattaatgcagcag

SEQ ID NO: 206 - DNA, 3852 bp, synthetic construct
  source 1..3852: mol_type = other DNA
ctgcgcgctcgctcgctcactgaggccgcccgggcaaagcccgggcgtcgggcgacctttggtcgcccggcctcagtgagcgagcgagcgcgcagagagggagtggggttcggtacctggaggcagaggagaaggcccaggcttcccagcagggctaaggatatgcaaggagtgcattcatccggaggtgttggcagcatcccagccccaccccattctcatcgtaaatcaggctcacttccattggctgcatacggtggagtgatgtgaccatatgtcacttgagcattacacaaatcctaatgagctaaaaatatgtttgttttagctaattgacctctttggccttcataaagcgggccccagaagcctggtggttgtttgtccttctcaggggaaaagtgaggcggccccttggaggaaggggccgggcagaatgatctaatcggattccaagcagctcaggggattgtctttttctagcaccttcttgccactcctaagcgtcctccgtgaccccggctgggatttagcctggtgctgtgtcagccccgggctcccaggggcttcccagtggtccccaggaaccctcgacagggccagggcgtctctctcgtccagcaagggcagggacgggccacaggccaagggcaccggagccccggctctgactgaccgcgttactcccacaggtgagcgggcggtttaagggaaggttggttggtggggtattaatctttaattacctggagcacctgcctgaaatcactttttttcaggttggaccggtccaccatgagccgcaagatagaaggctttttgttattacttctctttggctatgaagccacattgggattatcgtctaccgaggatgaaggcgaggacccctggtatcaaaaagcatgcaagtgcgattgccaaggaggacccaatgctctgtggtctgcaggtgccacctccttggactgtataccagaatgcccatatcacaagcctctgggtttcgagtcaggggaggtcacaccggaccagatcacctgctctaacccggagcagtatgtgggctggtattcttcgtggactgcaaacaaggcccggctcaacagtcaaggctttgggtgtgcctggctctccaagttccaggacagtagccagtggttacagatagatctgaaggagatcaaagtgatttcagggatcctcacccaggggcgctgtgacatcgatgagtggatgaccaagtacagcgtgcagtacaggaccgatgagcgcctgaactggatttactacaaggaccagactggaaacaaccgggtcttctatggcaactcggaccgcacctccacggttcagaacctgctgcggccccccatcatctcccgcttcatccgcctcatcccgctgggctggcacgtccgcattgccatccggatggagctgctggagtgcgtcagcaagtgtgcctgaagcttctagagcctcgactgtgccttctagttgccagccatctgttgtttgcccctcccccgtgccttccttgaccctggaaggtgccactcccactgtcctttcctaataaaatgaggaaattgcatcgcattgtctgagtaggtgtcattctattctggggggtggggtggggcaggacagcaagggggaggattgggaagagaatagcaggcatgctggggaaaaatttagggttagggttagggttagggaaaaatttagggttagggttagggttagggaaaaatttagggttagggttagggttagggaaaaacgcgtaggaacccctagtgatggagttggccactccctctctgcgcgctcgctcgctcactgaggccgggcgaccaaaggtcgcccgacgcccgggctttgcccgggcggcctcagtgagcgagcgagcgcgcagctggcgtaatagcgaagaggcccgcaccgatcgcccttcccaacagttgcgcaaattaattaaggcgatgaacggtaatcgtaaaactagcatgtcaatcatatgtaccccggttgataatcagaaaagccccaaaaacaggaagattgtataagcattaattaatttaaatacatggacatgtcagaattggttaattggttgtaacactgacccctatttgtttatttttctaaatacattcaaatatgtatccgctcatgagacaataaccctgataaatgcttcaataatattgaaaaaggaagaatatgagccatattcaacgggaaacgtcgaggccgcgattaaattccaacatggatgctgatttatatgggtataaatgggctcgcgataatgtcgggcaatcaggtgcgacaatctatcgcttgtatgggaagcccgatgcgccagagttgtttctgaaacatggcaaaggtagcgttgccaatgatgttacagatgagatggtcagactaaactggctgacggaatttatgccacttccgaccatcaagcattttatccgtactcctgatgatgcatggttactcaccactgcgatccccggaaaaacagcgttccaggtattagaagaatatcctgattcaggtgaaaatattgttgatgcgctggcagtgttcctgcgccggttgcactcgattcctgtttgtaattgtccttttaacagcgatcgcgtatttcgcctcgctcaggcgcaatcacgaatgaataacggtttggttgatgcgagtgattttgatgacgagcgtaatggctggcctgttgaacaagtctggaaagaaatgcataaacttttgccattctcaccggattcagtcgtcactcatggtgatttctcacttgataaccttatttttgacgaggggaaattaataggttgtattgatgttggacgagtcggaatcgcagaccgataccaggatcttgccatcctatggaactgcctcggtgagttttctccttcattacagaaacggctttttcaaaaatatggtattgataatcctgatatgaataaattgcagtttcatttgatgctcgatgagtttttctaaaagcagagcattacgctgacttgacgggacggcgcaagctcatgaccaaaatcccttaacgtgagttacgcgcgcgtcgttccactgagcgtcagaccccgtagaaaagatcaaaggatcttcttgagatcctttttttctgcgcgtaatctgctgcttgcaaacaaaaaaaccaccgctaccagcggtggtttgtttgccggatcaagagctaccaactctttttccgaaggtaactggcttcagcagagcgcagataccaaatactgttcttctagtgtagccgtagttagcccaccacttcaagaactctgtagcaccgcctacatacctcgctctgctaatcctgttaccagtggctgctgccagtggcgataagtcgtgtcttaccgggttggactcaagacgatagttaccggataaggcgcagcggtcgggctgaacggggggttcgtgcacacagcccagcttggagcgaacgacctacaccgaactgagatacctacagcgtgagctatgagaaagcgccacgcttcccgaagggagaaaggcggacaggtatccggtaagcggcagggtcggaacaggagagcgcacgagggagcttccagggggaaacgcctggtatctttatagtcctgtcgggtttcgccacctctgacttgagcgtcgatttttgtgatgctcgtcaggggggcggagcctatggaaaaacgccagcaacgcggcctttttacggttcctggccttttgctggccttttgctcacatgtttaaaccatgcacttggccgattcattaatgcag

SEQ ID NO: 207 - DNA, 5555 bp, synthetic construct
  source 1..5555: mol_type = other DNA
ctgcgcgctcgctcgctcactgaggccgcccgggcaaagcccgggcgtcgggcgacctttggtcgcccggcctcagtgagcgagcgagcgcgcagagagggagtggggttcggtacctggaggcagaggagaaggcccaggcttcccagcagggctaaggatatgcaaggagtgcattcatccggaggtgttggcagcatcccagccccaccccattctcatcgtaaatcaggctcacttccattggctgcatacggtggagtgatgtgaccatatgtcacttgagcattacacaaatcctaatgagctaaaaatatgtttgttttagctaattgacctctttggccttcataaagcctgcaggcgtaccagttaggggaccttctcctcccttttcctggatcctgagtacctctcctccctgacctcaggcttcctcctagtgtcaccttggcccctcttagaagccaattaggccctcagtttctgcagcggggattaatatgattatgaacacccccaatctcccagatgctgattcagccaggagcttaggagggggaggtcactttataagggtctgggggggtcagaacccagagtcatccagctggagccctgagtggctgagctcaggccttcgcagcattcttgggtgggagcagccacgggtcagccacaagggccactccggagccccggctctgactgaccgcgttactcccacaggtgagcgggcggtttaagggaaggttggttggtggggtattaatctttaattacctggagcacctgcctgaaatcactttttttcaggttggaccggtccaccatgagccgcaagatagaaggctttttgttattacttctctttggctatgaagccacattgggattatcgtctaccgaggatgaaggcgaggacccctggtatcaaaaagcatgcaagtgcgattgccaaggaggacccaatgctctgtggtctgcaggtgccacctccttggactgtataccagaatgcccatatcacaagcctctgggtttcgagtcaggggaggtcacaccggaccagatcacctgctctaacccggagcagtatgtgggctggtattcttcgtggactgcaaacaaggcccggctcaacagtcaaggctttgggtgtgcctggctctccaagttccaggacagtagccagtggttacagatagatctgaaggagatcaaagtgatttcagggatcctcacccaggggcgctgtgacatcgatgagtggatgaccaagtacagcgtgcagtacaggaccgatgagcgcctgaactggatttactacaaggaccagactggaaacaaccgggtcttctatggcaactcggaccgcacctccacggttcagaacctgctgcggccccccatcatctcccgcttcatccgcctcatcccgctgggctggcacgtccgcattgccatccggatggagctgctggagtgcgtcagcaagtgtgcctgaagcttctagagcctcgactgtgccttctagttgccagccatctgttgtttgcccctcccccgtgccttccttgaccctggaaggtgccactcccactgtcctttcctaataaaatgaggaaattgcatcgcattgtctgagtaggtgtcattctattctggggggtggggtggggcaggacagcaagggggaggattgggaagagaatagcaggcatgctggggaaaaatttagggttagggttagggttagggaaaaatttagggttagggttagggttagggaaaaatttagggttagggttagggttagggaaaaacgcgtaggaacccctagtgatggagttggccactccctctctgcgcgctcgctcgctcactgaggccgggcgaccaaaggtcgcccgacgcccgggctttgcccgggcggcctcagtgagcgagcgagcgcgcagctggcgtaatagcgaagaggcccgcaccgatcgcccttcccaacagttgcgcagcctgaatggcgaatggcgattccgttgcaatggctggcggtaatattgttctggatattaccagcaaggccgatagtttgagttcttctactcaggcaagtgatgttattactaatcaaagaagtattgcgacaacggttaatttgcgtgatggacagactcttttactcggtggcctcactgattataaaaacacttctcaggattctggcgtaccgttcctgtctaaaatccctttaatcggcctcctgtttagctcccgctctgattctaacgaggaaagcacgttatacgtgctcgtcaaagcaaccatagtacgcgccctgtagcggcgcattaagcgcggcgggtgtggtggttacgcgcagcgtgaccgctacacttgccagcgccctagcgcccgctcctttcgctttcttcccttcctttctcgccacgttcgccggctttccccgtcaagctctaaatcgggggctccctttagggttccgatttagtgctttacggcacctcgaccccaaaaaacttgattagggtgatggttcacgtagtgggccatcgccctgatagacggtttttcgccctttgacgttggagtccacgttctttaatagtggactcttgttccaaactggaacaacactcaaccctatctcggtctattcttttgatttataagggattttgccgatttcggcctattggttaaaaaatgagctgatttaacaaaaatttaacgcgaattttaacaaaatattaacgcttacaatttaaatatttgcttatacaatcttcctgtttttggggcttttctgattatcaaccggggtacatatgattgacatgctagttttacgattaccgttcatcgattctcttgtttgctccagactctcaggcaatgacctgatagcctttgtagagacctctcaaaaatagctaccctctccggcatgaatttatcagctagaacggttgaatatcatattgatggtgatttgactgtctccggcctttctcacccgtttgaatctttacctacacattactcaggcattgcatttaaaatatatgagggttctaaaaatttttatccttgcgttgaaataaaggcttctcccgcaaaagtattacagggtcataatgtttttggtacaaccgatttagctttatgctctgaggctttattgcttaattttgctaattctttgccttgcctgtatgatttattggatgttggaatcgcctgatgcggtattttctccttacgcatctgtgcggtatttcacaccgcatatggtgcactctcagtacaatctgctctgatgccgcatagttaagccagccccgacacccgccaacacccgctgacgcgccctgacgggcttgtctgctcccggcatccgcttacagacaagctgtgaccgtctccgggagctgcatgtgtcagaggttttcaccgtcatcaccgaaacgcgcgagacgaaagggcctcgtgatacgcctatttttataggttaatgtcatgataataatggtttcttagacgtcaggtggcacttttcggggaaatgtgcgcggaacccctatttgtttatttttctaaatacattcaaatatgtatccgctcatgagacaataaccctgataaatgcttcaataatattgaaaaaggaagagtatgagtattcaacatttccgtgtcgcccttattcccttttttgcggcattttgccttcctgtttttgctcacccagaaacgctggtgaaagtaaaagatgctgaagatcagttgggtgcacgagtgggttacatcgaactggatctcaacagcggtaagatccttgagagttttcgccccgaagaacgttttccaatgatgagcacttttaaagttctgctatgtggcgcggtattatcccgtattgacgccgggcaagagcaactcggtcgccgcatacactattctcagaatgacttggttgagtactcaccagtcacagaaaagcatcttacggatggcatgacagtaagagaattatgcagtgctgccataaccatgagtgataacactgcggccaacttacttctgacaacgatcggaggaccgaaggagctaaccgcttttttgcacaacatgggggatcatgtaactcgccttgatcgttgggaaccggagctgaatgaagccataccaaacgacgagcgtgacaccacgatgcctgtagcaatggcaacaacgttgcgcaaactattaactggcgaactacttactctagcttcccggcaacaattaatagactggatggaggcggataaagttgcaggaccacttctgcgctcggcccttccggctggctggtttattgctgataaatctggagccggtgagcgtgggtctcgcggtatcattgcagcactggggccagatggtaagccctcccgtatcgtagttatctacacgacggggagtcaggcaactatggatgaacgaaatagacagatcgctgagataggtgcctcactgattaagcattggtaactgtcagaccaagtttactcatatatactttagattgatttaaaacttcatttttaatttaaaaggatctaggtgaagatcctttttgataatctcatgaccaaaatcccttaacgtgagttttcgttccactgagcgtcagaccccgtagaaaagatcaaaggatcttcttgagatcctttttttctgcgcgtaatctgctgcttgcaaacaaaaaaaccaccgctaccagcggtggtttgtttgccggatcaagagctaccaactctttttccgaaggtaactggcttcagcagagcgcagataccaaatactgtccttctagtgtagccgtagttaggccaccacttcaagaactctgtagcaccgcctacatacctcgctctgctaatcctgttaccagtggctgctgccagtggcgataagtcgtgtcttaccgggttggactcaagacgatagttaccggataaggcgcagcggtcgggctgaacggggggttcgtgcacacagcccagcttggagcgaacgacctacaccgaactgagatacctacagcgtgagctatgagaaagcgccacgcttcccgaagggagaaaggcggacaggtatccggtaagcggcagggtcggaacaggagagcgcacgagggagcttccagggggaaacgcctggtatctttatagtcctgtcgggtttcgccacctctgacttgagcgtcgatttttgtgatgctcgtcaggggggcggagcctatggaaaaacgccagcaacgcggcctttttacggttcctggccttttgctggccttttgctcacatgttctttcctgcgttatcccctgattctgtggataaccgtattaccgcctttgagtgagctgataccgctcgccgcagccgaacgaccgagcgcagcgagtcagtgagcgaggaagcggaagagcgcccaatacgcaaaccgcctctccccgcgcgttggccgattcattaatgcagcag

SEQ ID NO: 208 - DNA, 3700 bp, synthetic construct
  source 1..3700: mol_type = other DNA
ctgcgcgctcgctcgctcactgaggccgcccgggcaaagcccgggcgtcgggcgacctttggtcgcccggcctcagtgagcgagcgagcgcgcagagagggagtggggttcggtacctggaggcagaggagaaggcccaggcttcccagcagggctaaggatatgcaaggagtgcattcatccggaggtgttggcagcatcccagccccaccccattctcatcgtaaatcaggctcacttccattggctgcatacggtggagtgatgtgaccatatgtcacttgagcattacacaaatcctaatgagctaaaaatatgtttgttttagctaattgacctctttggccttcataaagcctgcaggcccatttgtaggagtgagtcagctgacccgcccccggggttcctaatctcactaagaaagactttgctgatgacagggtttcctgggagtccatgcgtgcctggagcagcagcgtctccagggacaggcagccaccaccggagccccggctctgactgaccgcgttactcccacaggtgagcgggcggtttaagggaaggttggttggtggggtattaatctttaattacctggagcacctgcctgaaatcactttttttcaggttggaccggtccaccatgagccgcaagatagaaggctttttgttattacttctctttggctatgaagccacattgggattatcgtctaccgaggatgaaggcgaggacccctggtatcaaaaagcatgcaagtgcgattgccaaggaggacccaatgctctgtggtctgcaggtgccacctccttggactgtataccagaatgcccatatcacaagcctctgggtttcgagtcaggggaggtcacaccggaccagatcacctgctctaacccggagcagtatgtgggctggtattcttcgtggactgcaaacaaggcccggctcaacagtcaaggctttgggtgtgcctggctctccaagttccaggacagtagccagtggttacagatagatctgaaggagatcaaagtgatttcagggatcctcacccaggggcgctgtgacatcgatgagtggatgaccaagtacagcgtgcagtacaggaccgatgagcgcctgaactggatttactacaaggaccagactggaaacaaccgggtcttctatggcaactcggaccgcacctccacggttcagaacctgctgcggccccccatcatctcccgcttcatccgcctcatcccgctgggctggcacgtccgcattgccatccggatggagctgctggagtgcgtcagcaagtgtgcctgaagcttctagagcctcgactgtgccttctagttgccagccatctgttgtttgcccctcccccgtgccttccttgaccctggaaggtgccactcccactgtcctttcctaataaaatgaggaaattgcatcgcattgtctgagtaggtgtcattctattctggggggtggggtggggcaggacagcaagggggaggattgggaagagaatagcaggcatgctggggaaaaatttagggttagggttagggttagggaaaaatttagggttagggttagggttagggaaaaatttagggttagggttagggttagggaaaaacgcgtaggaacccctagtgatggagttggccactccctctctgcgcgctcgctcgctcactgaggccgggcgaccaaaggtcgcccgacgcccgggctttgcccgggcggcctcagtgagcgagcgagcgcgcagctggcgtaatagcgaagaggcccgcaccgatcgcccttcccaacagttgcgcaaattaattaaggcgatgaacggtaatcgtaaaactagcatgtcaatcatatgtaccccggttgataatcagaaaagccccaaaaacaggaagattgtataagcattaattaatttaaatacatggacatgtcagaattggttaattggttgtaacactgacccctatttgtttatttttctaaatacattcaaatatgtatccgctcatgagacaataaccctgataaatgcttcaataatattgaaaaaggaagaatatgagccatattcaacgggaaacgtcgaggccgcgattaaattccaacatggatgctgatttatatgggtataaatgggctcgcgataatgtcgggcaatcaggtgcgacaatctatcgcttgtatgggaagcccgatgcgccagagttgtttctgaaacatggcaaaggtagcgttgccaatgatgttacagatgagatggtcagactaaactggctgacggaatttatgccacttccgaccatcaagcattttatccgtactcctgatgatgcatggttactcaccactgcgatccccggaaaaacagcgttccaggtattagaagaatatcctgattcaggtgaaaatattgttgatgcgctggcagtgttcctgcgccggttgcactcgattcctgtttgtaattgtccttttaacagcgatcgcgtatttcgcctcgctcaggcgcaatcacgaatgaataacggtttggttgatgcgagtgattttgatgacgagcgtaatggctggcctgttgaacaagtctggaaagaaatgcataaacttttgccattctcaccggattcagtcgtcactcatggtgatttctcacttgataaccttatttttgacgaggggaaattaataggttgtattgatgttggacgagtcggaatcgcagaccgataccaggatcttgccatcctatggaactgcctcggtgagttttctccttcattacagaaacggctttttcaaaaatatggtattgataatcctgatatgaataaattgcagtttcatttgatgctcgatgagtttttctaaaagcagagcattacgctgacttgacgggacggcgcaagctcatgaccaaaatcccttaacgtgagttacgcgcgcgtcgttccactgagcgtcagaccccgtagaaaagatcaaaggatcttcttgagatcctttttttctgcgcgtaatctgctgcttgcaaacaaaaaaaccaccgctaccagcggtggtttgtttgccggatcaagagctaccaactctttttccgaaggtaactggcttcagcagagcgcagataccaaatactgttcttctagtgtagccgtagttagcccaccacttcaagaactctgtagcaccgcctacatacctcgctctgctaatcctgttaccagtggctgctgccagtggcgataagtcgtgtcttaccgggttggactcaagacgatagttaccggataaggcgcagcggtcgggctgaacggggggttcgtgcacacagcccagcttggagcgaacgacctacaccgaactgagatacctacagcgtgagctatgagaaagcgccacgcttcccgaagggagaaaggcggacaggtatccggtaagcggcagggtcggaacaggagagcgcacgagggagcttccagggggaaacgcctggtatctttatagtcctgtcgggtttcgccacctctgacttgagcgtcgatttttgtgatgctcgtcaggggggcggagcctatggaaaaacgccagcaacgcggcctttttacggttcctggccttttgctggccttttgctcacatgtttaaaccatgcacttggccgattcattaatgcag

SEQ ID NO: 209 - DNA, 6037 bp, synthetic construct
  source 1..6037: mol_type = other DNA
ctgcgcgctcgctcgctcactgaggccgcccgggcaaagcccgggcgtcgggcgacctttggtcgcccggcctcagtgagcgagcgagcgcgcagagagggagtggggttcggtacccgttacataacttacggtaaatggcccgcctggctgaccgcccaacgacccccgcccattgacgtcaatagtaacgccaatagggactttccattgacgtcaatgggtggagtatttacggtaaactgcccacttggcagtacatcaagtgtatcatatgccaagtacgccccctattgacgtcaatgacggtaaatggcccgcctggcattgtgcccagtacatgaccttatgggactttcctacttggcagtacatctacgtattagtcatcgctattaccatggtcgaggtgagccccacgttctgcttcactctccccatctcccccccctccccacccccaattttgtatttatttattttttaattattttgtgcagcgatgggggcggggggggggggggggcgcgcgccaggcggggcggggcggggcgaggggcggggcggggcgaggcggagaggtgcggcggcagccaatcagagcggcgcgctccgaaagtttccttttatggcgaggcggcggcggcggcggccctataaaaagcgaagcgcgcggcgggcgggagtcgctgcgacgctgccttcgccccgtgccccgctccgccgccgcctcgcgccgcccgccccggctctgactgaccgcgttactcccacaggtgagcgggcgggacggcccttctcctccgggctgtaattagctgagctttaagggaaggttggttggtggggtattaatctttaattacctggagcacctgcctgaaatcactttttttcaggttggaccggtccaccatgagccgcaagatagaaggctttttgttattacttctctttggctatgaagccacattgggattatcgtctaccgaggatgaaggcgaggacccctggtatcaaaaagcatgcaagtgcgattgccaaggaggacccaatgctctgtggtctgcaggtgccacctccttggactgtataccagaatgcccatatcacaagcctctgggtttcgagtcaggggaggtcacaccggaccagatcacctgctctaacccggagcagtatgtgggctggtattcttcgtggactgcaaacaaggcccggctcaacagtcaaggctttgggtgtgcctggctctccaagttccaggacagtagccagtggttacagatagatctgaaggagatcaaagtgatttcagggatcctcacccaggggcgctgtgacatcgatgagtggatgaccaagtacagcgtgcagtacaggaccgatgagcgcctgaactggatttactacaaggaccagactggaaacaaccgggtcttctatggcaactcggaccgcacctccacggttcagaacctgctgcggccccccatcatctcccgcttcatccgcctcatcccgctgggctggcacgtccgcattgccatccggatggagctgctggagtgcgtcagcaagtgtgcctgaagcttctagagcctcgactgtgccttctagttgccagccatctgttgtttgcccctcccccgtgccttccttgaccctggaaggtgccactcccactgtcctttcctaataaaatgaggaaattgcatcgcattgtctgagtaggtgtcattctattctggggggtggggtggggcaggacagcaagggggaggattgggaagagaatagcagaaattatctctaaggcatgtgaactggctgtcttggttttcatctgtacttcatctgctacctctgtgacctgaaacatatttataattccattaagctgtgcatatgatagatttatcatatgtattttccttaaaggatttttgtaagaactaattgaattgatacctgtaaagtctttatcacactacccaataaataataaatctctttgttcagctctctgtttctataaatatgtaccagttttattgtttttagtggtagtgattttattctctttctatatatatacacacacatgtgtgcattcataaatatatacaatttttatgaataaaaaattattagcaatcaatattgaaaaccactgatttttgtttatgtgagcaaacagcagcatgctggggaaaaatttagggttagggttagggttagggaaaaatttagggttagggttagggttagggaaaaatttagggttagggttagggttagggaaaaacgcgtaggaacccctagtgatggagttggccactccctctctgcgcgctcgctcgctcactgaggccgggcgaccaaaggtcgcccgacgcccgggctttgcccgggcggcctcagtgagcgagcgagcgcgcagctggcgtaatagcgaagaggcccgcaccgatcgcccttcccaacagttgcgcagcctgaatggcgaatggcgattccgttgcaatggctggcggtaatattgttctggatattaccagcaaggccgatagtttgagttcttctactcaggcaagtgatgttattactaatcaaagaagtattgcgacaacggttaatttgcgtgatggacagactcttttactcggtggcctcactgattataaaaacacttctcaggattctggcgtaccgttcctgtctaaaatccctttaatcggcctcctgtttagctcccgctctgattctaacgaggaaagcacgttatacgtgctcgtcaaagcaaccatagtacgcgccctgtagcggcgcattaagcgcggcgggtgtggtggttacgcgcagcgtgaccgctacacttgccagcgccctagcgcccgctcctttcgctttcttcccttcctttctcgccacgttcgccggctttccccgtcaagctctaaatcgggggctccctttagggttccgatttagtgctttacggcacctcgaccccaaaaaacttgattagggtgatggttcacgtagtgggccatcgccctgatagacggtttttcgccctttgacgttggagtccacgttctttaatagtggactcttgttccaaactggaacaacactcaaccctatctcggtctattcttttgatttataagggattttgccgatttcggcctattggttaaaaaatgagctgatttaacaaaaatttaacgcgaattttaacaaaatattaacgcttacaatttaaatatttgcttatacaatcttcctgtttttggggcttttctgattatcaaccggggtacatatgattgacatgctagttttacgattaccgttcatcgattctcttgtttgctccagactctcaggcaatgacctgatagcctttgtagagacctctcaaaaatagctaccctctccggcatgaatttatcagctagaacggttgaatatcatattgatggtgatttgactgtctccggcctttctcacccgtttgaatctttacctacacattactcaggcattgcatttaaaatatatgagggttctaaaaatttttatccttgcgttgaaataaaggcttctcccgcaaaagtattacagggtcataatgtttttggtacaaccgatttagctttatgctctgaggctttattgcttaattttgctaattctttgccttgcctgtatgatttattggatgttggaatcgcctgatgcggtattttctccttacgcatctgtgcggtatttcacaccgcatatggtgcactctcagtacaatctgctctgatgccgcatagttaagccagccccgacacccgccaacacccgctgacgcgccctgacgggcttgtctgctcccggcatccgcttacagacaagctgtgaccgtctccgggagctgcatgtgtcagaggttttcaccgtcatcaccgaaacgcgcgagacgaaagggcctcgtgatacgcctatttttataggttaatgtcatgataataatggtttcttagacgtcaggtggcacttttcggggaaatgtgcgcggaacccctatttgtttatttttctaaatacattcaaatatgtatccgctcatgagacaataaccctgataaatgcttcaataatattgaaaaaggaagagtatgagtattcaacatttccgtgtcgcccttattcccttttttgcggcattttgccttcctgtttttgctcacccagaaacgctggtgaaagtaaaagatgctgaagatcagttgggtgcacgagtgggttacatcgaactggatctcaacagcggtaagatccttgagagttttcgccccgaagaacgttttccaatgatgagcacttttaaagttctgctatgtggcgcggtattatcccgtattgacgccgggcaagagcaactcggtcgccgcatacactattctcagaatgacttggttgagtactcaccagtcacagaaaagcatcttacggatggcatgacagtaagagaattatgcagtgctgccataaccatgagtgataacactgcggccaacttacttctgacaacgatcggaggaccgaaggagctaaccgcttttttgcacaacatgggggatcatgtaactcgccttgatcgttgggaaccggagctgaatgaagccataccaaacgacgagcgtgacaccacgatgcctgtagcaatggcaacaacgttgcgcaaactattaactggcgaactacttactctagcttcccggcaacaattaatagactggatggaggcggataaagttgcaggaccacttctgcgctcggcccttccggctggctggtttattgctgataaatctggagccggtgagcgtgggtctcgcggtatcattgcagcactggggccagatggtaagccctcccgtatcgtagttatctacacgacggggagtcaggcaactatggatgaacgaaatagacagatcgctgagataggtgcctcactgattaagcattggtaactgtcagaccaagtttactcatatatactttagattgatttaaaacttcatttttaatttaaaaggatctaggtgaagatcctttttgataatctcatgaccaaaatcccttaacgtgagttttcgttccactgagcgtcagaccccgtagaaaagatcaaaggatcttcttgagatcctttttttctgcgcgtaatctgctgcttgcaaacaaaaaaaccaccgctaccagcggtggtttgtttgccggatcaagagctaccaactctttttccgaaggtaactggcttcagcagagcgcagataccaaatactgtccttctagtgtagccgtagttaggccaccacttcaagaactctgtagcaccgcctacatacctcgctctgctaatcctgttaccagtggctgctgccagtggcgataagtcgtgtcttaccgggttggactcaagacgatagttaccggataaggcgcagcggtcgggctgaacggggggttcgtgcacacagcccagcttggagcgaacgacctacaccgaactgagatacctacagcgtgagctatgagaaagcgccacgcttcccgaagggagaaaggcggacaggtatccggtaagcggcagggtcggaacaggagagcgcacgagggagcttccagggggaaacgcctggtatctttatagtcctgtcgggtttcgccacctctgacttgagcgtcgatttttgtgatgctcgtcaggggggcggagcctatggaaaaacgccagcaacgcggcctttttacggttcctggccttttgctggccttttgctcacatgttctttcctgcgttatcccctgattctgtggataaccgtattaccgcctttgagtgagctgataccgctcgccgcagccgaacgaccgagcgcagcgagtcagtgagcgaggaagcggaagagcgcccaatacgcaaaccgcctctccccgcgcgttggccgattcattaatgcagcag

SEQ ID NO: 210 - DNA, 4251 bp, synthetic construct
  source 1..4251: mol_type = other DNA
ctgcgcgctcgctcgctcactgaggccgcccgggcaaagcccgggcgtcgggcgacctttggtcgcccggcctcagtgagcgagcgagcgcgcagagagggagtggggttcggtacctggaggcagaggagaaggcccaggcttcccagcagggctaaggatatgcaaggagtgcattcatccggaggtgttggcagcatcccagccccaccccattctcatcgtaaatcaggctcacttccattggctgcatacggtggagtgatgtgaccatatgtcacttgagcattacacaaatcctaatgagctaaaaatatgtttgttttagctaattgacctctttggccttcataaagcgggccccagaagcctggtggttgtttgtccttctcaggggaaaagtgaggcggccccttggaggaaggggccgggcagaatgatctaatcggattccaagcagctcaggggattgtctttttctagcaccttcttgccactcctaagcgtcctccgtgaccccggctgggatttagcctggtgctgtgtcagccccgggctcccaggggcttcccagtggtccccaggaaccctcgacagggccagggcgtctctctcgtccagcaagggcagggacgggccacaggccaagggcaccggagccccggctctgactgaccgcgttactcccacaggtgagcgggcggtttaagggaaggttggttggtggggtattaatctttaattacctggagcacctgcctgaaatcactttttttcaggttggaccggtccaccatgagccgcaagatagaaggctttttgttattacttctctttggctatgaagccacattgggattatcgtctaccgaggatgaaggcgaggacccctggtatcaaaaagcatgcaagtgcgattgccaaggaggacccaatgctctgtggtctgcaggtgccacctccttggactgtataccagaatgcccatatcacaagcctctgggtttcgagtcaggggaggtcacaccggaccagatcacctgctctaacccggagcagtatgtgggctggtattcttcgtggactgcaaacaaggcccggctcaacagtcaaggctttgggtgtgcctggctctccaagttccaggacagtagccagtggttacagatagatctgaaggagatcaaagtgatttcagggatcctcacccaggggcgctgtgacatcgatgagtggatgaccaagtacagcgtgcagtacaggaccgatgagcgcctgaactggatttactacaaggaccagactggaaacaaccgggtcttctatggcaactcggaccgcacctccacggttcagaacctgctgcggccccccatcatctcccgcttcatccgcctcatcccgctgggctggcacgtccgcattgccatccggatggagctgctggagtgcgtcagcaagtgtgcctgaagcttctagagcctcgactgtgccttctagttgccagccatctgttgtttgcccctcccccgtgccttccttgaccctggaaggtgccactcccactgtcctttcctaataaaatgaggaaattgcatcgcattgtctgagtaggtgtcattctattctggggggtggggtggggcaggacagcaagggggaggattgggaagagaatagcagaaattatctctaaggcatgtgaactggctgtcttggttttcatctgtacttcatctgctacctctgtgacctgaaacatatttataattccattaagctgtgcatatgatagatttatcatatgtattttccttaaaggatttttgtaagaactaattgaattgatacctgtaaagtctttatcacactacccaataaataataaatctctttgttcagctctctgtttctataaatatgtaccagttttattgtttttagtggtagtgattttattctctttctatatatatacacacacatgtgtgcattcataaatatatacaatttttatgaataaaaaattattagcaatcaatattgaaaaccactgatttttgtttatgtgagcaaacagcagcatgctggggaaaaatttagggttagggttagggttagggaaaaatttagggttagggttagggttagggaaaaatttagggttagggttagggttagggaaaaacgcgtaggaacccctagtgatggagttggccactccctctctgcgcgctcgctcgctcactgaggccgggcgaccaaaggtcgcccgacgcccgggctttgcccgggcggcctcagtgagcgagcgagcgcgcagctggcgtaatagcgaagaggcccgcaccgatcgcccttcccaacagttgcgcaaattaattaaggcgatgaacggtaatcgtaaaactagcatgtcaatcatatgtaccccggttgataatcagaaaagccccaaaaacaggaagattgtataagcattaattaatttaaatacatggacatgtcagaattggttaattggttgtaacactgacccctatttgtttatttttctaaatacattcaaatatgtatccgctcatgagacaataaccctgataaatgcttcaataatattgaaaaaggaagaatatgagccatattcaacgggaaacgtcgaggccgcgattaaattccaacatggatgctgatttatatgggtataaatgggctcgcgataatgtcgggcaatcaggtgcgacaatctatcgcttgtatgggaagcccgatgcgccagagttgtttctgaaacatggcaaaggtagcgttgccaatgatgttacagatgagatggtcagactaaactggctgacggaatttatgccacttccgaccatcaagcattttatccgtactcctgatgatgcatggttactcaccactgcgatccccggaaaaacagcgttccaggtattagaagaatatcctgattcaggtgaaaatattgttgatgcgctggcagtgttcctgcgccggttgcactcgattcctgtttgtaattgtccttttaacagcgatcgcgtatttcgcctcgctcaggcgcaatcacgaatgaataacggtttggttgatgcgagtgattttgatgacgagcgtaatggctggcctgttgaacaagtctggaaagaaatgcataaacttttgccattctcaccggattcagtcgtcactcatggtgatttctcacttgataaccttatttttgacgaggggaaattaataggttgtattgatgttggacgagtcggaatcgcagaccgataccaggatcttgccatcctatggaactgcctcggtgagttttctccttcattacagaaacggctttttcaaaaatatggtattgataatcctgatatgaataaattgcagtttcatttgatgctcgatgagtttttctaaaagcagagcattacgctgacttgacgggacggcgcaagctcatgaccaaaatcccttaacgtgagttacgcgcgcgtcgttccactgagcgtcagaccccgtagaaaagatcaaaggatcttcttgagatcctttttttctgcgcgtaatctgctgcttgcaaacaaaaaaaccaccgctaccagcggtggtttgtttgccggatcaagagctaccaactctttttccgaaggtaactggcttcagcagagcgcagataccaaatactgttcttctagtgtagccgtagttagcccaccacttcaagaactctgtagcaccgcctacatacctcgctctgctaatcctgttaccagtggctgctgccagtggcgataagtcgtgtcttaccgggttggactcaagacgatagttaccggataaggcgcagcggtcgggctgaacggggggttcgtgcacacagcccagcttggagcgaacgacctacaccgaactgagatacctacagcgtgagctatgagaaagcgccacgcttcccgaagggagaaaggcggacaggtatccggtaagcggcagggtcggaacaggagagcgcacgagggagcttccagggggaaacgcctggtatctttatagtcctgtcgggtttcgccacctctgacttgagcgtcgatttttgtgatgctcgtcaggggggcggagcctatggaaaaacgccagcaacgcggcctttttacggttcctggccttttgctggccttttgctcacatgtttaaaccatgcacttggccgattcattaatgcag

SEQ ID NO: 211 - DNA, 5954 bp, synthetic construct
  source 1..5954: mol_type = other DNA
ctgcgcgctcgctcgctcactgaggccgcccgggcaaagcccgggcgtcgggcgacctttggtcgcccggcctcagtgagcgagcgagcgcgcagagagggagtggggttcggtacctggaggcagaggagaaggcccaggcttcccagcagggctaaggatatgcaaggagtgcattcatccggaggtgttggcagcatcccagccccaccccattctcatcgtaaatcaggctcacttccattggctgcatacggtggagtgatgtgaccatatgtcacttgagcattacacaaatcctaatgagctaaaaatatgtttgttttagctaattgacctctttggccttcataaagcctgcaggcgtaccagttaggggaccttctcctcccttttcctggatcctgagtacctctcctccctgacctcaggcttcctcctagtgtcaccttggcccctcttagaagccaattaggccctcagtttctgcagcggggattaatatgattatgaacacccccaatctcccagatgctgattcagccaggagcttaggagggggaggtcactttataagggtctgggggggtcagaacccagagtcatccagctggagccctgagtggctgagctcaggccttcgcagcattcttgggtgggagcagccacgggtcagccacaagggccactccggagccccggctctgactgaccgcgttactcccacaggtgagcgggcggtttaagggaaggttggttggtggggtattaatctttaattacctggagcacctgcctgaaatcactttttttcaggttggaccggtccaccatgagccgcaagatagaaggctttttgttattacttctctttggctatgaagccacattgggattatcgtctaccgaggatgaaggcgaggacccctggtatcaaaaagcatgcaagtgcgattgccaaggaggacccaatgctctgtggtctgcaggtgccacctccttggactgtataccagaatgcccatatcacaagcctctgggtttcgagtcaggggaggtcacaccggaccagatcacctgctctaacccggagcagtatgtgggctggtattcttcgtggactgcaaacaaggcccggctcaacagtcaaggctttgggtgtgcctggctctccaagttccaggacagtagccagtggttacagatagatctgaaggagatcaaagtgatttcagggatcctcacccaggggcgctgtgacatcgatgagtggatgaccaagtacagcgtgcagtacaggaccgatgagcgcctgaactggatttactacaaggaccagactggaaacaaccgggtcttctatggcaactcggaccgcacctccacggttcagaacctgctgcggccccccatcatctcccgcttcatccgcctcatcccgctgggctggcacgtccgcattgccatccggatggagctgctggagtgcgtcagcaagtgtgcctgaagcttctagagcctcgactgtgccttctagttgccagccatctgttgtttgcccctcccccgtgccttccttgaccctggaaggtgccactcccactgtcctttcctaataaaatgaggaaattgcatcgcattgtctgagtaggtgtcattctattctggggggtggggtggggcaggacagcaagggggaggattgggaagagaatagcagaaattatctctaaggcatgtgaactggctgtcttggttttcatctgtacttcatctgctacctctgtgacctgaaacatatttataattccattaagctgtgcatatgatagatttatcatatgtattttccttaaaggatttttgtaagaactaattgaattgatacctgtaaagtctttatcacactacccaataaataataaatctctttgttcagctctctgtttctataaatatgtaccagttttattgtttttagtggtagtgattttattctctttctatatatatacacacacatgtgtgcattcataaatatatacaatttttatgaataaaaaattattagcaatcaatattgaaaaccactgatttttgtttatgtgagcaaacagcagcatgctggggaaaaatttagggttagggttagggttagggaaaaatttagggttagggttagggttagggaaaaatttagggttagggttagggttagggaaaaacgcgtaggaacccctagtgatggagttggccactccctctctgcgcgctcgctcgctcactgaggccgggcgaccaaaggtcgcccgacgcccgggctttgcccgggcggcctcagtgagcgagcgagcgcgcagctggcgtaatagcgaagaggcccgcaccgatcgcccttcccaacagttgcgcagcctgaatggcgaatggcgattccgttgcaatggctggcggtaatattgttctggatattaccagcaaggccgatagtttgagttcttctactcaggcaagtgatgttattactaatcaaagaagtattgcgacaacggttaatttgcgtgatggacagactcttttactcggtggcctcactgattataaaaacacttctcaggattctggcgtaccgttcctgtctaaaatccctttaatcggcctcctgtttagctcccgctctgattctaacgaggaaagcacgttatacgtgctcgtcaaagcaaccatagtacgcgccctgtagcggcgcattaagcgcggcgggtgtggtggttacgcgcagcgtgaccgctacacttgccagcgccctagcgcccgctcctttcgctttcttcccttcctttctcgccacgttcgccggctttccccgtcaagctctaaatcgggggctccctttagggttccgatttagtgctttacggcacctcgaccccaaaaaacttgattagggtgatggttcacgtagtgggccatcgccctgatagacggtttttcgccctttgacgttggagtccacgttctttaatagtggactcttgttccaaactggaacaacactcaaccctatctcggtctattcttttgatttataagggattttgccgatttcggcctattggttaaaaaatgagctgatttaacaaaaatttaacgcgaattttaacaaaatattaacgcttacaatttaaatatttgcttatacaatcttcctgtttttggggcttttctgattatcaaccggggtacatatgattgacatgctagttttacgattaccgttcatcgattctcttgtttgctccagactctcaggcaatgacctgatagcctttgtagagacctctcaaaaatagctaccctctccggcatgaatttatcagctagaacggttgaatatcatattgatggtgatttgactgtctccggcctttctcacccgtttgaatctttacctacacattactcaggcattgcatttaaaatatatgagggttctaaaaatttttatccttgcgttgaaataaaggcttctcccgcaaaagtattacagggtcataatgtttttggtacaaccgatttagctttatgctctgaggctttattgcttaattttgctaattctttgccttgcctgtatgatttattggatgttggaatcgcctgatgcggtattttctccttacgcatctgtgcggtatttcacaccgcatatggtgcactctcagtacaatctgctctgatgccgcatagttaagccagccccgacacccgccaacacccgctgacgcgccctgacgggcttgtctgctcccggcatccgcttacagacaagctgtgaccgtctccgggagctgcatgtgtcagaggttttcaccgtcatcaccgaaacgcgcgagacgaaagggcctcgtgatacgcctatttttataggttaatgtcatgataataatggtttcttagacgtcaggtggcacttttcggggaaatgtgcgcggaacccctatttgtttatttttctaaatacattcaaatatgtatccgctcatgagacaataaccctgataaatgcttcaataatattgaaaaaggaagagtatgagtattcaacatttccgtgtcgcccttattcccttttttgcggcattttgccttcctgtttttgctcacccagaaacgctggtgaaagtaaaagatgctgaagatcagttgggtgcacgagtgggttacatcgaactggatctcaacagcggtaagatccttgagagttttcgccccgaagaacgttttccaatgatgagcacttttaaagttctgctatgtggcgcggtattatcccgtattgacgccgggcaagagcaactcggtcgccgcatacactattctcagaatgacttggttgagtactcaccagtcacagaaaagcatcttacggatggcatgacagtaagagaattatgcagtgctgccataaccatgagtgataacactgcggccaacttacttctgacaacgatcggaggaccgaaggagctaaccgcttttttgcacaacatgggggatcatgtaactcgccttgatcgttgggaaccggagctgaatgaagccataccaaacgacgagcgtgacaccacgatgcctgtagcaatggcaacaacgttgcgcaaactattaactggcgaactacttactctagcttcccggcaacaattaatagactggatggaggcggataaagttgcaggaccacttctgcgctcggcccttccggctggctggtttattgctgataaatctggagccggtgagcgtgggtctcgcggtatcattgcagcactggggccagatggtaagccctcccgtatcgtagttatctacacgacggggagtcaggcaactatggatgaacgaaatagacagatcgctgagataggtgcctcactgattaagcattggtaactgtcagaccaagtttactcatatatactttagattgatttaaaacttcatttttaatttaaaaggatctaggtgaagatcctttttgataatctcatgaccaaaatcccttaacgtgagttttcgttccactgagcgtcagaccccgtagaaaagatcaaaggatcttcttgagatcctttttttctgcgcgtaatctgctgcttgcaaacaaaaaaaccaccgctaccagcggtggtttgtttgccggatcaagagctaccaactctttttccgaaggtaactggcttcagcagagcgcagataccaaatactgtccttctagtgtagccgtagttaggccaccacttcaagaactctgtagcaccgcctacatacctcgctctgctaatcctgttaccagtggctgctgccagtggcgataagtcgtgtcttaccgggttggactcaagacgatagttaccggataaggcgcagcggtcgggctgaacggggggttcgtgcacacagcccagcttggagcgaacgacctacaccgaactgagatacctacagcgtgagctatgagaaagcgccacgcttcccgaagggagaaaggcggacaggtatccggtaagcggcagggtcggaacaggagagcgcacgagggagcttccagggggaaacgcctggtatctttatagtcctgtcgggtttcgccacctctgacttgagcgtcgatttttgtgatgctcgtcaggggggcggagcctatggaaaaacgccagcaacgcggcctttttacggttcctggccttttgctggccttttgctcacatgttctttcctgcgttatcccctgattctgtggataaccgtattaccgcctttgagtgagctgataccgctcgccgcagccgaacgaccgagcgcagcgagtcagtgagcgaggaagcggaagagcgcccaatacgcaaaccgcctctccccgcgcgttggccgattcattaatgcagcag

SEQ ID NO: 212 - DNA, 4099 bp, synthetic construct
  source 1..4099: mol_type = other DNA
ctgcgcgctcgctcgctcactgaggccgcccgggcaaagcccgggcgtcgggcgacctttggtcgcccggcctcagtgagcgagcgagcgcgcagagagggagtggggttcggtacctggaggcagaggagaaggcccaggcttcccagcagggctaaggatatgcaaggagtgcattcatccggaggtgttggcagcatcccagccccaccccattctcatcgtaaatcaggctcacttccattggctgcatacggtggagtgatgtgaccatatgtcacttgagcattacacaaatcctaatgagctaaaaatatgtttgttttagctaattgacctctttggccttcataaagcctgcaggcccatttgtaggagtgagtcagctgacccgcccccggggttcctaatctcactaagaaagactttgctgatgacagggtttcctgggagtccatgcgtgcctggagcagcagcgtctccagggacaggcagccaccaccggagccccggctctgactgaccgcgttactcccacaggtgagcgggcggtttaagggaaggttggttggtggggtattaatctttaattacctggagcacctgcctgaaatcactttttttcaggttggaccggtccaccatgagccgcaagatagaaggctttttgttattacttctctttggctatgaagccacattgggattatcgtctaccgaggatgaaggcgaggacccctggtatcaaaaagcatgcaagtgcgattgccaaggaggacccaatgctctgtggtctgcaggtgccacctccttggactgtataccagaatgcccatatcacaagcctctgggtttcgagtcaggggaggtcacaccggaccagatcacctgctctaacccggagcagtatgtgggctggtattcttcgtggactgcaaacaaggcccggctcaacagtcaaggctttgggtgtgcctggctctccaagttccaggacagtagccagtggttacagatagatctgaaggagatcaaagtgatttcagggatcctcacccaggggcgctgtgacatcgatgagtggatgaccaagtacagcgtgcagtacaggaccgatgagcgcctgaactggatttactacaaggaccagactggaaacaaccgggtcttctatggcaactcggaccgcacctccacggttcagaacctgctgcggccccccatcatctcccgcttcatccgcctcatcccgctgggctggcacgtccgcattgccatccggatggagctgctggagtgcgtcagcaagtgtgcctgaagcttctagagcctcgactgtgccttctagttgccagccatctgttgtttgcccctcccccgtgccttccttgaccctggaaggtgccactcccactgtcctttcctaataaaatgaggaaattgcatcgcattgtctgagtaggtgtcattctattctggggggtggggtggggcaggacagcaagggggaggattgggaagagaatagcagaaattatctctaaggcatgtgaactggctgtcttggttttcatctgtacttcatctgctacctctgtgacctgaaacatatttataattccattaagctgtgcatatgatagatttatcatatgtattttccttaaaggatttttgtaagaactaattgaattgatacctgtaaagtctttatcacactacccaataaataataaatctctttgttcagctctctgtttctataaatatgtaccagttttattgtttttagtggtagtgattttattctctttctatatatatacacacacatgtgtgcattcataaatatatacaatttttatgaataaaaaattattagcaatcaatattgaaaaccactgatttttgtttatgtgagcaaacagcagcatgctggggaaaaatttagggttagggttagggttagggaaaaatttagggttagggttagggttagggaaaaatttagggttagggttagggttagggaaaaacgcgtaggaacccctagtgatggagttggccactccctctctgcgcgctcgctcgctcactgaggccgggcgaccaaaggtcgcccgacgcccgggctttgcccgggcggcctcagtgagcgagcgagcgcgcagctggcgtaatagcgaagaggcccgcaccgatcgcccttcccaacagttgcgcaaattaattaaggcgatgaacggtaatcgtaaaactagcatgtcaatcatatgtaccccggttgataatcagaaaagccccaaaaacaggaagattgtataagcattaattaatttaaatacatggacatgtcagaattggttaattggttgtaacactgacccctatttgtttatttttctaaatacattcaaatatgtatccgctcatgagacaataaccctgataaatgcttcaataatattgaaaaaggaagaatatgagccatattcaacgggaaacgtcgaggccgcgattaaattccaacatggatgctgatttatatgggtataaatgggctcgcgataatgtcgggcaatcaggtgcgacaatctatcgcttgtatgggaagcccgatgcgccagagttgtttctgaaacatggcaaaggtagcgttgccaatgatgttacagatgagatggtcagactaaactggctgacggaatttatgccacttccgaccatcaagcattttatccgtactcctgatgatgcatggttactcaccactgcgatccccggaaaaacagcgttccaggtattagaagaatatcctgattcaggtgaaaatattgttgatgcgctggcagtgttcctgcgccggttgcactcgattcctgtttgtaattgtccttttaacagcgatcgcgtatttcgcctcgctcaggcgcaatcacgaatgaataacggtttggttgatgcgagtgattttgatgacgagcgtaatggctggcctgttgaacaagtctggaaagaaatgcataaacttttgccattctcaccggattcagtcgtcactcatggtgatttctcacttgataaccttatttttgacgaggggaaattaataggttgtattgatgttggacgagtcggaatcgcagaccgataccaggatcttgccatcctatggaactgcctcggtgagttttctccttcattacagaaacggctttttcaaaaatatggtattgataatcctgatatgaataaattgcagtttcatttgatgctcgatgagtttttctaaaagcagagcattacgctgacttgacgggacggcgcaagctcatgaccaaaatcccttaacgtgagttacgcgcgcgtcgttccactgagcgtcagaccccgtagaaaagatcaaaggatcttcttgagatcctttttttctgcgcgtaatctgctgcttgcaaacaaaaaaaccaccgctaccagcggtggtttgtttgccggatcaagagctaccaactctttttccgaaggtaactggcttcagcagagcgcagataccaaatactgttcttctagtgtagccgtagttagcccaccacttcaagaactctgtagcaccgcctacatacctcgctctgctaatcctgttaccagtggctgctgccagtggcgataagtcgtgtcttaccgggttggactcaagacgatagttaccggataaggcgcagcggtcgggctgaacggggggttcgtgcacacagcccagcttggagcgaacgacctacaccgaactgagatacctacagcgtgagctatgagaaagcgccacgcttcccgaagggagaaaggcggacaggtatccggtaagcggcagggtcggaacaggagagcgcacgagggagcttccagggggaaacgcctggtatctttatagtcctgtcgggtttcgccacctctgacttgagcgtcgatttttgtgatgctcgtcaggggggcggagcctatggaaaaacgccagcaacgcggcctttttacggttcctggccttttgctggccttttgctcacatgtttaaaccatgcacttggccgattcattaatgcag

SEQ ID NO: 213 - DNA, 5668 bp, synthetic construct
  source 1..5668: mol_type = other DNA
ctgcgcgctcgctcgctcactgaggccgcccgggcaaagcccgggcgtcgggcgacctttggtcgcccggcctcagtgagcgagcgagcgcgcagagagggagtggggttcggtacccgttacataacttacggtaaatggcccgcctggctgaccgcccaacgacccccgcccattgacgtcaatagtaacgccaatagggactttccattgacgtcaatgggtggagtatttacggtaaactgcccacttggcagtacatcaagtgtatcatatgccaagtacgccccctattgacgtcaatgacggtaaatggcccgcctggcattgtgcccagtacatgaccttatgggactttcctacttggcagtacatctacgtattagtcatcgctattaccatggtcgaggtgagccccacgttctgcttcactctccccatctcccccccctccccacccccaattttgtatttatttattttttaattattttgtgcagcgatgggggcggggggggggggggggcgcgcgccaggcggggcggggcggggcgaggggcggggcggggcgaggcggagaggtgcggcggcagccaatcagagcggcgcgctccgaaagtttccttttatggcgaggcggcggcggcggcggccctataaaaagcgaagcgcgcggcgggcgggagtcgctgcgacgctgccttcgccccgtgccccgctccgccgccgcctcgcgccgcccgccccggctctgactgaccgcgttactcccacaggtgagcgggcgggacggcccttctcctccgggctgtaattagctgagctttaagggaaggttggttggtggggtattaatctttaattacctggagcacctgcctgaaatcactttttttcaggttggaccggtccaccatgagccgcaagatagaaggctttttgttattacttctctttggctatgaagccacattgggattatcggagcagaagctgatcagcgaggaagacctctctaccgaggatgaaggcgaggacccctggtatcaaaaagcatgcaagtgcgattgccaaggaggacccaatgctctgtggtctgcaggtgccacctccttggactgtataccagaatgcccatatcacaagcctctgggtttcgagtcaggggaggtcacaccggaccagatcacctgctctaacccggagcagtatgtgggctggtattcttcgtggactgcaaacaaggcccggctcaacagtcaaggctttgggtgtgcctggctctccaagttccaggacagtagccagtggttacagatagatctgaaggagatcaaagtgatttcagggatcctcacccaggggcgctgtgacatcgatgagtggatgaccaagtacagcgtgcagtacaggaccgatgagcgcctgaactggatttactacaaggaccagactggaaacaaccgggtcttctatggcaactcggaccgcacctccacggttcagaacctgctgcggccccccatcatctcccgcttcatccgcctcatcccgctgggctggcacgtccgcattgccatccggatggagctgctggagtgcgtcagcaagtgtgcctgaagcttctagagcctcgactgtgccttctagttgccagccatctgttgtttgcccctcccccgtgccttccttgaccctggaaggtgccactcccactgtcctttcctaataaaatgaggaaattgcatcgcattgtctgagtaggtgtcattctattctggggggtggggtggggcaggacagcaagggggaggattgggaagagaatagcaggcatgctggggaaaaatttagggttagggttagggttagggaaaaatttagggttagggttagggttagggaaaaatttagggttagggttagggttagggaaaaacgcgtaggaacccctagtgatggagttggccactccctctctgcgcgctcgctcgctcactgaggccgggcgaccaaaggtcgcccgacgcccgggctttgcccgggcggcctcagtgagcgagcgagcgcgcagctggcgtaatagcgaagaggcccgcaccgatcgcccttcccaacagttgcgcagcctgaatggcgaatggcgattccgttgcaatggctggcggtaatattgttctggatattaccagcaaggccgatagtttgagttcttctactcaggcaagtgatgttattactaatcaaagaagtattgcgacaacggttaatttgcgtgatggacagactcttttactcggtggcctcactgattataaaaacacttctcaggattctggcgtaccgttcctgtctaaaatccctttaatcggcctcctgtttagctcccgctctgattctaacgaggaaagcacgttatacgtgctcgtcaaagcaaccatagtacgcgccctgtagcggcgcattaagcgcggcgggtgtggtggttacgcgcagcgtgaccgctacacttgccagcgccctagcgcccgctcctttcgctttcttcccttcctttctcgccacgttcgccggctttccccgtcaagctctaaatcgggggctccctttagggttccgatttagtgctttacggcacctcgaccccaaaaaacttgattagggtgatggttcacgtagtgggccatcgccctgatagacggtttttcgccctttgacgttggagtccacgttctttaatagtggactcttgttccaaactggaacaacactcaaccctatctcggtctattcttttgatttataagggattttgccgatttcggcctattggttaaaaaatgagctgatttaacaaaaatttaacgcgaattttaacaaaatattaacgcttacaatttaaatatttgcttatacaatcttcctgtttttggggcttttctgattatcaaccggggtacatatgattgacatgctagttttacgattaccgttcatcgattctcttgtttgctccagactctcaggcaatgacctgatagcctttgtagagacctctcaaaaatagctaccctctccggcatgaatttatcagctagaacggttgaatatcatattgatggtgatttgactgtctccggcctttctcacccgtttgaatctttacctacacattactcaggcattgcatttaaaatatatgagggttctaaaaatttttatccttgcgttgaaataaaggcttctcccgcaaaagtattacagggtcataatgtttttggtacaaccgatttagctttatgctctgaggctttattgcttaattttgctaattctttgccttgcctgtatgatttattggatgttggaatcgcctgatgcggtattttctccttacgcatctgtgcggtatttcacaccgcatatggtgcactctcagtacaatctgctctgatgccgcatagttaagccagccccgacacccgccaacacccgctgacgcgccctgacgggcttgtctgctcccggcatccgcttacagacaagctgtgaccgtctccgggagctgcatgtgtcagaggttttcaccgtcatcaccgaaacgcgcgagacgaaagggcctcgtgatacgcctatttttataggttaatgtcatgataataatggtttcttagacgtcaggtggcacttttcggggaaatgtgcgcggaacccctatttgtttatttttctaaatacattcaaatatgtatccgctcatgagacaataaccctgataaatgcttcaataatattgaaaaaggaagagtatgagtattcaacatttccgtgtcgcccttattcccttttttgcggcattttgccttcctgtttttgctcacccagaaacgctggtgaaagtaaaagatgctgaagatcagttgggtgcacgagtgggttacatcgaactggatctcaacagcggtaagatccttgagagttttcgccccgaagaacgttttccaatgatgagcacttttaaagttctgctatgtggcgcggtattatcccgtattgacgccgggcaagagcaactcggtcgccgcatacactattctcagaatgacttggttgagtactcaccagtcacagaaaagcatcttacggatggcatgacagtaagagaattatgcagtgctgccataaccatgagtgataacactgcggccaacttacttctgacaacgatcggaggaccgaaggagctaaccgcttttttgcacaacatgggggatcatgtaactcgccttgatcgttgggaaccggagctgaatgaagccataccaaacgacgagcgtgacaccacgatgcctgtagcaatggcaacaacgttgcgcaaactattaactggcgaactacttactctagcttcccggcaacaattaatagactggatggaggcggataaagttgcaggaccacttctgcgctcggcccttccggctggctggtttattgctgataaatctggagccggtgagcgtgggtctcgcggtatcattgcagcactggggccagatggtaagccctcccgtatcgtagttatctacacgacggggagtcaggcaactatggatgaacgaaatagacagatcgctgagataggtgcctcactgattaagcattggtaactgtcagaccaagtttactcatatatactttagattgatttaaaacttcatttttaatttaaaaggatctaggtgaagatcctttttgataatctcatgaccaaaatcccttaacgtgagttttcgttccactgagcgtcagaccccgtagaaaagatcaaaggatcttcttgagatcctttttttctgcgcgtaatctgctgcttgcaaacaaaaaaaccaccgctaccagcggtggtttgtttgccggatcaagagctaccaactctttttccgaaggtaactggcttcagcagagcgcagataccaaatactgtccttctagtgtagccgtagttaggccaccacttcaagaactctgtagcaccgcctacatacctcgctctgctaatcctgttaccagtggctgctgccagtggcgataagtcgtgtcttaccgggttggactcaagacgatagttaccggataaggcgcagcggtcgggctgaacggggggttcgtgcacacagcccagcttggagcgaacgacctacaccgaactgagatacctacagcgtgagctatgagaaagcgccacgcttcccgaagggagaaaggcggacaggtatccggtaagcggcagggtcggaacaggagagcgcacgagggagcttccagggggaaacgcctggtatctttatagtcctgtcgggtttcgccacctctgacttgagcgtcgatttttgtgatgctcgtcaggggggcggagcctatggaaaaacgccagcaacgcggcctttttacggttcctggccttttgctggccttttgctcacatgttctttcctgcgttatcccctgattctgtggataaccgtattaccgcctttgagtgagctgataccgctcgccgcagccgaacgaccgagcgcagcgagtcagtgagcgaggaagcggaagagcgcccaatacgcaaaccgcctctccccgcgcgttggccgattcattaatgcagcag

SEQ ID NO: 214 - DNA, 3882 bp, synthetic construct
  source 1..3882: mol_type = other DNA
ctgcgcgctcgctcgctcactgaggccgcccgggcaaagcccgggcgtcgggcgacctttggtcgcccggcctcagtgagcgagcgagcgcgcagagagggagtggggttcggtacctggaggcagaggagaaggcccaggcttcccagcagggctaaggatatgcaaggagtgcattcatccggaggtgttggcagcatcccagccccaccccattctcatcgtaaatcaggctcacttccattggctgcatacggtggagtgatgtgaccatatgtcacttgagcattacacaaatcctaatgagctaaaaatatgtttgttttagctaattgacctctttggccttcataaagcgggccccagaagcctggtggttgtttgtccttctcaggggaaaagtgaggcggccccttggaggaaggggccgggcagaatgatctaatcggattccaagcagctcaggggattgtctttttctagcaccttcttgccactcctaagcgtcctccgtgaccccggctgggatttagcctggtgctgtgtcagccccgggctcccaggggcttcccagtggtccccaggaaccctcgacagggccagggcgtctctctcgtccagcaagggcagggacgggccacaggccaagggcaccggagccccggctctgactgaccgcgttactcccacaggtgagcgggcggtttaagggaaggttggttggtggggtattaatctttaattacctggagcacctgcctgaaatcactttttttcaggttggaccggtccaccatgagccgcaagatagaaggctttttgttattacttctctttggctatgaagccacattgggattatcggagcagaagctgatcagcgaggaagacctctctaccgaggatgaaggcgaggacccctggtatcaaaaagcatgcaagtgcgattgccaaggaggacccaatgctctgtggtctgcaggtgccacctccttggactgtataccagaatgcccatatcacaagcctctgggtttcgagtcaggggaggtcacaccggaccagatcacctgctctaacccggagcagtatgtgggctggtattcttcgtggactgcaaacaaggcccggctcaacagtcaaggctttgggtgtgcctggctctccaagttccaggacagtagccagtggttacagatagatctgaaggagatcaaagtgatttcagggatcctcacccaggggcgctgtgacatcgatgagtggatgaccaagtacagcgtgcagtacaggaccgatgagcgcctgaactggatttactacaaggaccagactggaaacaaccgggtcttctatggcaactcggaccgcacctccacggttcagaacctgctgcggccccccatcatctcccgcttcatccgcctcatcccgctgggctggcacgtccgcattgccatccggatggagctgctggagtgcgtcagcaagtgtgcctgaagcttctagagcctcgactgtgccttctagttgccagccatctgttgtttgcccctcccccgtgccttccttgaccctggaaggtgccactcccactgtcctttcctaataaaatgaggaaattgcatcgcattgtctgagtaggtgtcattctattctggggggtggggtggggcaggacagcaagggggaggattgggaagagaatagcaggcatgctggggaaaaatttagggttagggttagggttagggaaaaatttagggttagggttagggttagggaaaaatttagggttagggttagggttagggaaaaacgcgtaggaacccctagtgatggagttggccactccctctctgcgcgctcgctcgctcactgaggccgggcgaccaaaggtcgcccgacgcccgggctttgcccgggcggcctcagtgagcgagcgagcgcgcagctggcgtaatagcgaagaggcccgcaccgatcgcccttcccaacagttgcgcaaattaattaaggcgatgaacggtaatcgtaaaactagcatgtcaatcatatgtaccccggttgataatcagaaaagccccaaaaacaggaagattgtataagcattaattaatttaaatacatggacatgtcagaattggttaattggttgtaacactgacccctatttgtttatttttctaaatacattcaaatatgtatccgctcatgagacaataaccctgataaatgcttcaataatattgaaaaaggaagaatatgagccatattcaacgggaaacgtcgaggccgcgattaaattccaacatggatgctgatttatatgggtataaatgggctcgcgataatgtcgggcaatcaggtgcgacaatctatcgcttgtatgggaagcccgatgcgccagagttgtttctgaaacatggcaaaggtagcgttgccaatgatgttacagatgagatggtcagactaaactggctgacggaatttatgccacttccgaccatcaagcattttatccgtactcctgatgatgcatggttactcaccactgcgatccccggaaaaacagcgttccaggtattagaagaatatcctgattcaggtgaaaatattgttgatgcgctggcagtgttcctgcgccggttgcactcgattcctgtttgtaattgtccttttaacagcgatcgcgtatttcgcctcgctcaggcgcaatcacgaatgaataacggtttggttgatgcgagtgattttgatgacgagcgtaatggctggcctgttgaacaagtctggaaagaaatgcataaacttttgccattctcaccggattcagtcgtcactcatggtgatttctcacttgataaccttatttttgacgaggggaaattaataggttgtattgatgttggacgagtcggaatcgcagaccgataccaggatcttgccatcctatggaactgcctcggtgagttttctccttcattacagaaacggctttttcaaaaatatggtattgataatcctgatatgaataaattgcagtttcatttgatgctcgatgagtttttctaaaagcagagcattacgctgacttgacgggacggcgcaagctcatgaccaaaatcccttaacgtgagttacgcgcgcgtcgttccactgagcgtcagaccccgtagaaaagatcaaaggatcttcttgagatcctttttttctgcgcgtaatctgctgcttgcaaacaaaaaaaccaccgctaccagcggtggtttgtttgccggatcaagagctaccaactctttttccgaaggtaactggcttcagcagagcgcagataccaaatactgttcttctagtgtagccgtagttagcccaccacttcaagaactctgtagcaccgcctacatacctcgctctgctaatcctgttaccagtggctgctgccagtggcgataagtcgtgtcttaccgggttggactcaagacgatagttaccggataaggcgcagcggtcgggctgaacggggggttcgtgcacacagcccagcttggagcgaacgacctacaccgaactgagatacctacagcgtgagctatgagaaagcgccacgcttcccgaagggagaaaggcggacaggtatccggtaagcggcagggtcggaacaggagagcgcacgagggagcttccagggggaaacgcctggtatctttatagtcctgtcgggtttcgccacctctgacttgagcgtcgatttttgtgatgctcgtcaggggggcggagcctatggaaaaacgccagcaacgcggcctttttacggttcctggccttttgctggccttttgctcacatgtttaaaccatgcacttggccgattcattaatgcag

SEQ ID NO: 215 - DNA, 6067 bp, synthetic construct
  source 1..6067: mol_type = other DNA
ctgcgcgctcgctcgctcactgaggccgcccgggcaaagcccgggcgtcgggcgacctttggtcgcccggcctcagtgagcgagcgagcgcgcagagagggagtggggttcggtacccgttacataacttacggtaaatggcccgcctggctgaccgcccaacgacccccgcccattgacgtcaatagtaacgccaatagggactttccattgacgtcaatgggtggagtatttacggtaaactgcccacttggcagtacatcaagtgtatcatatgccaagtacgccccctattgacgtcaatgacggtaaatggcccgcctggcattgtgcccagtacatgaccttatgggactttcctacttggcagtacatctacgtattagtcatcgctattaccatggtcgaggtgagccccacgttctgcttcactctccccatctcccccccctccccacccccaattttgtatttatttattttttaattattttgtgcagcgatgggggcggggggggggggggggcgcgcgccaggcggggcggggcggggcgaggggcggggcggggcgaggcggagaggtgcggcggcagccaatcagagcggcgcgctccgaaagtttccttttatggcgaggcggcggcggcggcggccctataaaaagcgaagcgcgcggcgggcgggagtcgctgcgacgctgccttcgccccgtgccccgctccgccgccgcctcgcgccgcccgccccggctctgactgaccgcgttactcccacaggtgagcgggcgggacggcccttctcctccgggctgtaattagctgagctttaagggaaggttggttggtggggtattaatctttaattacctggagcacctgcctgaaatcactttttttcaggttggaccggtccaccatgagccgcaagatagaaggctttttgttattacttctctttggctatgaagccacattgggattatcggagcagaagctgatcagcgaggaagacctctctaccgaggatgaaggcgaggacccctggtatcaaaaagcatgcaagtgcgattgccaaggaggacccaatgctctgtggtctgcaggtgccacctccttggactgtataccagaatgcccatatcacaagcctctgggtttcgagtcaggggaggtcacaccggaccagatcacctgctctaacccggagcagtatgtgggctggtattcttcgtggactgcaaacaaggcccggctcaacagtcaaggctttgggtgtgcctggctctccaagttccaggacagtagccagtggttacagatagatctgaaggagatcaaagtgatttcagggatcctcacccaggggcgctgtgacatcgatgagtggatgaccaagtacagcgtgcagtacaggaccgatgagcgcctgaactggatttactacaaggaccagactggaaacaaccgggtcttctatggcaactcggaccgcacctccacggttcagaacctgctgcggccccccatcatctcccgcttcatccgcctcatcccgctgggctggcacgtccgcattgccatccggatggagctgctggagtgcgtcagcaagtgtgcctgaagcttctagagcctcgactgtgccttctagttgccagccatctgttgtttgcccctcccccgtgccttccttgaccctggaaggtgccactcccactgtcctttcctaataaaatgaggaaattgcatcgcattgtctgagtaggtgtcattctattctggggggtggggtggggcaggacagcaagggggaggattgggaagagaatagcagaaattatctctaaggcatgtgaactggctgtcttggttttcatctgtacttcatctgctacctctgtgacctgaaacatatttataattccattaagctgtgcatatgatagatttatcatatgtattttccttaaaggatttttgtaagaactaattgaattgatacctgtaaagtctttatcacactacccaataaataataaatctctttgttcagctctctgtttctataaatatgtaccagttttattgtttttagtggtagtgattttattctctttctatatatatacacacacatgtgtgcattcataaatatatacaatttttatgaataaaaaattattagcaatcaatattgaaaaccactgatttttgtttatgtgagcaaacagcagcatgctggggaaaaatttagggttagggttagggttagggaaaaatttagggttagggttagggttagggaaaaatttagggttagggttagggttagggaaaaacgcgtaggaacccctagtgatggagttggccactccctctctgcgcgctcgctcgctcactgaggccgggcgaccaaaggtcgcccgacgcccgggctttgcccgggcggcctcagtgagcgagcgagcgcgcagctggcgtaatagcgaagaggcccgcaccgatcgcccttcccaacagttgcgcagcctgaatggcgaatggcgattccgttgcaatggctggcggtaatattgttctggatattaccagcaaggccgatagtttgagttcttctactcaggcaagtgatgttattactaatcaaagaagtattgcgacaacggttaatttgcgtgatggacagactcttttactcggtggcctcactgattataaaaacacttctcaggattctggcgtaccgttcctgtctaaaatccctttaatcggcctcctgtttagctcccgctctgattctaacgaggaaagcacgttatacgtgctcgtcaaagcaaccatagtacgcgccctgtagcggcgcattaagcgcggcgggtgtggtggttacgcgcagcgtgaccgctacacttgccagcgccctagcgcccgctcctttcgctttcttcccttcctttctcgccacgttcgccggctttccccgtcaagctctaaatcgggggctccctttagggttccgatttagtgctttacggcacctcgaccccaaaaaacttgattagggtgatggttcacgtagtgggccatcgccctgatagacggtttttcgccctttgacgttggagtccacgttctttaatagtggactcttgttccaaactggaacaacactcaaccctatctcggtctattcttttgatttataagggattttgccgatttcggcctattggttaaaaaatgagctgatttaacaaaaatttaacgcgaattttaacaaaatattaacgcttacaatttaaatatttgcttatacaatcttcctgtttttggggcttttctgattatcaaccggggtacatatgattgacatgctagttttacgattaccgttcatcgattctcttgtttgctccagactctcaggcaatgacctgatagcctttgtagagacctctcaaaaatagctaccctctccggcatgaatttatcagctagaacggttgaatatcatattgatggtgatttgactgtctccggcctttctcacccgtttgaatctttacctacacattactcaggcattgcatttaaaatatatgagggttctaaaaatttttatccttgcgttgaaataaaggcttctcccgcaaaagtattacagggtcataatgtttttggtacaaccgatttagctttatgctctgaggctttattgcttaattttgctaattctttgccttgcctgtatgatttattggatgttggaatcgcctgatgcggtattttctccttacgcatctgtgcggtatttcacaccgcatatggtgcactctcagtacaatctgctctgatgccgcatagttaagccagccccgacacccgccaacacccgctgacgcgccctgacgggcttgtctgctcccggcatccgcttacagacaagctgtgaccgtctccgggagctgcatgtgtcagaggttttcaccgtcatcaccgaaacgcgcgagacgaaagggcctcgtgatacgcctatttttataggttaatgtcatgataataatggtttcttagacgtcaggtggcacttttcggggaaatgtgcgcggaacccctatttgtttatttttctaaatacattcaaatatgtatccgctcatgagacaataaccctgataaatgcttcaataatattgaaaaaggaagagtatgagtattcaacatttccgtgtcgcccttattcccttttttgcggcattttgccttcctgtttttgctcacccagaaacgctggtgaaagtaaaagatgctgaagatcagttgggtgcacgagtgggttacatcgaactggatctcaacagcggtaagatccttgagagttttcgccccgaagaacgttttccaatgatgagcacttttaaagttctgctatgtggcgcggtattatcccgtattgacgccgggcaagagcaactcggtcgccgcatacactattctcagaatgacttggttgagtactcaccagtcacagaaaagcatcttacggatggcatgacagtaagagaattatgcagtgctgccataaccatgagtgataacactgcggccaacttacttctgacaacgatcggaggaccgaaggagctaaccgcttttttgcacaacatgggggatcatgtaactcgccttgatcgttgggaaccggagctgaatgaagccataccaaacgacgagcgtgacaccacgatgcctgtagcaatggcaacaacgttgcgcaaactattaactggcgaactacttactctagcttcccggcaacaattaatagactggatggaggcggataaagttgcaggaccacttctgcgctcggcccttccggctggctggtttattgctgataaatctggagccggtgagcgtgggtctcgcggtatcattgcagcactggggccagatggtaagccctcccgtatcgtagttatctacacgacggggagtcaggcaactatggatgaacgaaatagacagatcgctgagataggtgcctcactgattaagcattggtaactgtcagaccaagtttactcatatatactttagattgatttaaaacttcatttttaatttaaaaggatctaggtgaagatcctttttgataatctcatgaccaaaatcccttaacgtgagttttcgttccactgagcgtcagaccccgtagaaaagatcaaaggatcttcttgagatcctttttttctgcgcgtaatctgctgcttgcaaacaaaaaaaccaccgctaccagcggtggtttgtttgccggatcaagagctaccaactctttttccgaaggtaactggcttcagcagagcgcagataccaaatactgtccttctagtgtagccgtagttaggccaccacttcaagaactctgtagcaccgcctacatacctcgctctgctaatcctgttaccagtggctgctgccagtggcgataagtcgtgtcttaccgggttggactcaagacgatagttaccggataaggcgcagcggtcgggctgaacggggggttcgtgcacacagcccagcttggagcgaacgacctacaccgaactgagatacctacagcgtgagctatgagaaagcgccacgcttcccgaagggagaaaggcggacaggtatccggtaagcggcagggtcggaacaggagagcgcacgagggagcttccagggggaaacgcctggtatctttatagtcctgtcgggtttcgccacctctgacttgagcgtcgatttttgtgatgctcgtcaggggggcggagcctatggaaaaacgccagcaacgcggcctttttacggttcctggccttttgctggccttttgctcacatgttctttcctgcgttatcccctgattctgtggataaccgtattaccgcctttgagtgagctgataccgctcgccgcagccgaacgaccgagcgcagcgagtcagtgagcgaggaagcggaagagcgcccaatacgcaaaccgcctctccccgcgcgttggccgattcattaatgcagcag

SEQ ID NO: 216 - DNA, 4281 bp, synthetic construct
  source 1..4281: mol_type = other DNA
ctgcgcgctcgctcgctcactgaggccgcccgggcaaagcccgggcgtcgggcgacctttggtcgcccggcctcagtgagcgagcgagcgcgcagagagggagtggggttcggtacctggaggcagaggagaaggcccaggcttcccagcagggctaaggatatgcaaggagtgcattcatccggaggtgttggcagcatcccagccccaccccattctcatcgtaaatcaggctcacttccattggctgcatacggtggagtgatgtgaccatatgtcacttgagcattacacaaatcctaatgagctaaaaatatgtttgttttagctaattgacctctttggccttcataaagcgggccccagaagcctggtggttgtttgtccttctcaggggaaaagtgaggcggccccttggaggaaggggccgggcagaatgatctaatcggattccaagcagctcaggggattgtctttttctagcaccttcttgccactcctaagcgtcctccgtgaccccggctgggatttagcctggtgctgtgtcagccccgggctcccaggggcttcccagtggtccccaggaaccctcgacagggccagggcgtctctctcgtccagcaagggcagggacgggccacaggccaagggcaccggagccccggctctgactgaccgcgttactcccacaggtgagcgggcggtttaagggaaggttggttggtggggtattaatctttaattacctggagcacctgcctgaaatcactttttttcaggttggaccggtccaccatgagccgcaagatagaaggctttttgttattacttctctttggctatgaagccacattgggattatcggagcagaagctgatcagcgaggaagacctctctaccgaggatgaaggcgaggacccctggtatcaaaaagcatgcaagtgcgattgccaaggaggacccaatgctctgtggtctgcaggtgccacctccttggactgtataccagaatgcccatatcacaagcctctgggtttcgagtcaggggaggtcacaccggaccagatcacctgctctaacccggagcagtatgtgggctggtattcttcgtggactgcaaacaaggcccggctcaacagtcaaggctttgggtgtgcctggctctccaagttccaggacagtagccagtggttacagatagatctgaaggagatcaaagtgatttcagggatcctcacccaggggcgctgtgacatcgatgagtggatgaccaagtacagcgtgcagtacaggaccgatgagcgcctgaactggatttactacaaggaccagactggaaacaaccgggtcttctatggcaactcggaccgcacctccacggttcagaacctgctgcggccccccatcatctcccgcttcatccgcctcatcccgctgggctggcacgtccgcattgccatccggatggagctgctggagtgcgtcagcaagtgtgcctgaagcttctagagcctcgactgtgccttctagttgccagccatctgttgtttgcccctcccccgtgccttccttgaccctggaaggtgccactcccactgtcctttcctaataaaatgaggaaattgcatcgcattgtctgagtaggtgtcattctattctggggggtggggtggggcaggacagcaagggggaggattgggaagagaatagcagaaattatctctaaggcatgtgaactggctgtcttggttttcatctgtacttcatctgctacctctgtgacctgaaacatatttataattccattaagctgtgcatatgatagatttatcatatgtattttccttaaaggatttttgtaagaactaattgaattgatacctgtaaagtctttatcacactacccaataaataataaatctctttgttcagctctctgtttctataaatatgtaccagttttattgtttttagtggtagtgattttattctctttctatatatatacacacacatgtgtgcattcataaatatatacaatttttatgaataaaaaattattagcaatcaatattgaaaaccactgatttttgtttatgtgagcaaacagcagcatgctggggaaaaatttagggttagggttagggttagggaaaaatttagggttagggttagggttagggaaaaatttagggttagggttagggttagggaaaaacgcgtaggaacccctagtgatggagttggccactccctctctgcgcgctcgctcgctcactgaggccgggcgaccaaaggtcgcccgacgcccgggctttgcccgggcggcctcagtgagcgagcgagcgcgcagctggcgtaatagcgaagaggcccgcaccgatcgcccttcccaacagttgcgcaaattaattaaggcgatgaacggtaatcgtaaaactagcatgtcaatcatatgtaccccggttgataatcagaaaagccccaaaaacaggaagattgtataagcattaattaatttaaatacatggacatgtcagaattggttaattggttgtaacactgacccctatttgtttatttttctaaatacattcaaatatgtatccgctcatgagacaataaccctgataaatgcttcaataatattgaaaaaggaagaatatgagccatattcaacgggaaacgtcgaggccgcgattaaattccaacatggatgctgatttatatgggtataaatgggctcgcgataatgtcgggcaatcaggtgcgacaatctatcgcttgtatgggaagcccgatgcgccagagttgtttctgaaacatggcaaaggtagcgttgccaatgatgttacagatgagatggtcagactaaactggctgacggaatttatgccacttccgaccatcaagcattttatccgtactcctgatgatgcatggttactcaccactgcgatccccggaaaaacagcgttccaggtattagaagaatatcctgattcaggtgaaaatattgttgatgcgctggcagtgttcctgcgccggttgcactcgattcctgtttgtaattgtccttttaacagcgatcgcgtatttcgcctcgctcaggcgcaatcacgaatgaataacggtttggttgatgcgagtgattttgatgacgagcgtaatggctggcctgttgaacaagtctggaaagaaatgcataaacttttgccattctcaccggattcagtcgtcactcatggtgatttctcacttgataaccttatttttgacgaggggaaattaataggttgtattgatgttggacgagtcggaatcgcagaccgataccaggatcttgccatcctatggaactgcctcggtgagttttctccttcattacagaaacggctttttcaaaaatatggtattgataatcctgatatgaataaattgcagtttcatttgatgctcgatgagtttttctaaaagcagagcattacgctgacttgacgggacggcgcaagctcatgaccaaaatcccttaacgtgagttacgcgcgcgtcgttccactgagcgtcagaccccgtagaaaagatcaaaggatcttcttgagatcctttttttctgcgcgtaatctgctgcttgcaaacaaaaaaaccaccgctaccagcggtggtttgtttgccggatcaagagctaccaactctttttccgaaggtaactggcttcagcagagcgcagataccaaatactgttcttctagtgtagccgtagttagcccaccacttcaagaactctgtagcaccgcctacatacctcgctctgctaatcctgttaccagtggctgctgccagtggcgataagtcgtgtcttaccgggttggactcaagacgatagttaccggataaggcgcagcggtcgggctgaacggggggttcgtgcacacagcccagcttggagcgaacgacctacaccgaactgagatacctacagcgtgagctatgagaaagcgccacgcttcccgaagggagaaaggcggacaggtatccggtaagcggcagggtcggaacaggagagcgcacgagggagcttccagggggaaacgcctggtatctttatagtcctgtcgggtttcgccacctctgacttgagcgtcgatttttgtgatgctcgtcaggggggcggagcctatggaaaaacgccagcaacgcggcctttttacggttcctggccttttgctggccttttgctcacatgtttaaaccatgcacttggccgattcattaatgcag

SEQ ID NO: 217-220 - skipped (4 entries)

SEQ ID NO: 221 - DNA, 399 bp, synthetic construct
  source 1..399: mol_type = other DNA
aattatctctaaggcatgtgaactggctgtcttggttttcatctgtacttcatctgctacctctgtgacctgaaacatatttataattccattaagctgtgcatatgatagatttatcatatgtattttccttaaaggatttttgtaagaactaattgaattgatacctgtaaagtctttatcacactacccaataaataataaatctctttgttcagctctctgtttctataaatatgtaccagttttattgtttttagtggtagtgattttattctctttctatatatatacacacacatgtgtgcattcataaatatatacaatttttatgaataaaaaattattagcaatcaatattgaaaaccactgatttttgtttatgtgagcaaacagcag

SEQ ID NO: 222 - DNA, 87 bp, synthetic construct
  source 1..87: mol_type = other DNA
gtgagcgggcggtttaagggaaggttggttggtggggtattaatctttaattacctggagcacctgcctgaaatcactttttttcag

SEQ ID NO: 223 - DNA, 3758 bp, synthetic construct
  source 1..3758: mol_type = other DNA
ctgcgcgctcgctcgctcactgaggccgcccgggcaaagcccgggcgtcgggcgacctttggtcgcccggcctcagtgagcgagcgagcgcgcagagagggagtggggttcggtacctggaggcagaggagaaggcccaggcttcccagcagggctaaggatatgcaaggagtgcattcatccggaggtgttggcagcatcccagccccaccccattctcatcgtaaatcaggctcacttccattggctgcatacggtggagtgatgtgaccatatgtcacttgagcattacacaaatcctaatgagctaaaaatatgtttgttttagctaattgacctctttggccttcataaagcgggccccagaagcctggtggttgtttgtccttctcaggggaaaagtgaggcggccccttggaggaaggggccgggcagaatgatctaatcggattccaagcagctcaggggattgtctttttctagcaccttcttgccactcctaagcgtcctccgtgaccccggctgggatttagcctggtgctgtgtcagccccgggctcccaggggcttcccagtggtccccaggaaccctcgacagggccagggcgtctctctcgtccagcaagggcagggacgggccacaggccaagggcaccggagccccggctctgactgaccgcgttactcccacaggtgagcgggcggtttaagggaaggttggttggtggggtattaatctttaattacctggagcacctgcctgaaatcactttttttcaggttggaccggtccaccatgagccgcaagatagaaggctttttgttattacttctctttggctatgaagccacattgggattatcgtctaccgaggatgaaggcgaggacccctggtatcaaaaagcatgcaagtgcgattgccaaggaggacccaatgctctgtggtctgcaggtgccacctccttggactgtataccagaatgcccatatcacaagcctctgggtttcgagtcaggggaggtcacaccggaccagatcacctgctctaacccggagcagtatgtgggctggtattcttcgtggactgcaaacaaggcccggctcaacagtcaaggctttgggtgtgcctggctctccaagttccaggacagtagccagtggttacagatagatctgaaggagatcaaagtgatttcagggatcctcacccaggggcgctgtgacatcgatgagtggatgaccaagtacagcgtgcagtacaggaccgatgagcgcctgaactggatttactacaaggaccagactggaaacaaccgggtcttctatggcaactcggaccgcacctccacggttcagaacctgctgcggccccccatcatctcccgcttcatccgcctcatcccgctgggctggcacgtccgcattgccatccggatggagctgctggagtgcgtcagcaagtgtgcctgaagcttctagagcctcgactgtgccttctagttgccagccatctgttgtttgcccctcccccgtgccttccttgaccctggaaggtgccactcccactgtcctttcctaataaaatgaggaaattgcatcgcattgtctgagtaggtgtcattctattctggggggtggggtggggcaggacagcaagggggaggattgggaagagaatagcaggcatgctggggacgcgtaggaacccctagtgatggagttggccactccctctctgcgcgctcgctcgctcactgaggccgggcgaccaaaggtcgcccgacgcccgggctttgcccgggcggcctcagtgagcgagcgagcgcgcagctggcgtaatagcgaagaggcccgcaccgatcgcccttcccaacagttgcgcaaattaattaaggcgatgaacggtaatcgtaaaactagcatgtcaatcatatgtaccccggttgataatcagaaaagccccaaaaacaggaagattgtataagcattaattaatttaaatacatggacatgtcagaattggttaattggttgtaacactgacccctatttgtttatttttctaaatacattcaaatatgtatccgctcatgagacaataaccctgataaatgcttcaataatattgaaaaaggaagaatatgagccatattcaacgggaaacgtcgaggccgcgattaaattccaacatggatgctgatttatatgggtataaatgggctcgcgataatgtcgggcaatcaggtgcgacaatctatcgcttgtatgggaagcccgatgcgccagagttgtttctgaaacatggcaaaggtagcgttgccaatgatgttacagatgagatggtcagactaaactggctgacggaatttatgccacttccgaccatcaagcattttatccgtactcctgatgatgcatggttactcaccactgcgatccccggaaaaacagcgttccaggtattagaagaatatcctgattcaggtgaaaatattgttgatgcgctggcagtgttcctgcgccggttgcactcgattcctgtttgtaattgtccttttaacagcgatcgcgtatttcgcctcgctcaggcgcaatcacgaatgaataacggtttggttgatgcgagtgattttgatgacgagcgtaatggctggcctgttgaacaagtctggaaagaaatgcataaacttttgccattctcaccggattcagtcgtcactcatggtgatttctcacttgataaccttatttttgacgaggggaaattaataggttgtattgatgttggacgagtcggaatcgcagaccgataccaggatcttgccatcctatggaactgcctcggtgagttttctccttcattacagaaacggctttttcaaaaatatggtattgataatcctgatatgaataaattgcagtttcatttgatgctcgatgagtttttctaaaagcagagcattacgctgacttgacgggacggcgcaagctcatgaccaaaatcccttaacgtgagttacgcgcgcgtcgttccactgagcgtcagaccccgtagaaaagatcaaaggatcttcttgagatcctttttttctgcgcgtaatctgctgcttgcaaacaaaaaaaccaccgctaccagcggtggtttgtttgccggatcaagagctaccaactctttttccgaaggtaactggcttcagcagagcgcagataccaaatactgttcttctagtgtagccgtagttagcccaccacttcaagaactctgtagcaccgcctacatacctcgctctgctaatcctgttaccagtggctgctgccagtggcgataagtcgtgtcttaccgggttggactcaagacgatagttaccggataaggcgcagcggtcgggctgaacggggggttcgtgcacacagcccagcttggagcgaacgacctacaccgaactgagatacctacagcgtgagctatgagaaagcgccacgcttcccgaagggagaaaggcggacaggtatccggtaagcggcagggtcggaacaggagagcgcacgagggagcttccagggggaaacgcctggtatctttatagtcctgtcgggtttcgccacctctgacttgagcgtcgatttttgtgatgctcgtcaggggggcggagcctatggaaaaacgccagcaacgcggcctttttacggttcctggccttttgctggccttttgctcacatgtttaaaccatgcacttggccgattcattaatgcag

SEQ ID NO: 224 - DNA, 1578 bp, synthetic construct
  source 1..1578: mol_type = other DNA
tggaggcagaggagaaggcccaggcttcccagcagggctaaggatatgcaaggagtgcattcatccggaggtgttggcagcatcccagccccaccccattctcatcgtaaatcaggctcacttccattggctgcatacggtggagtgatgtgaccatatgtcacttgagcattacacaaatcctaatgagctaaaaatatgtttgttttagctaattgacctctttggccttcataaagcgggccccagaagcctggtggttgtttgtccttctcaggggaaaagtgaggcggccccttggaggaaggggccgggcagaatgatctaatcggattccaagcagctcaggggattgtctttttctagcaccttcttgccactcctaagcgtcctccgtgaccccggctgggatttagcctggtgctgtgtcagccccgggctcccaggggcttcccagtggtccccaggaaccctcgacagggccagggcgtctctctcgtccagcaagggcagggacgggccacaggccaagggcaccggagccccggctctgactgaccgcgttactcccacaggtgagcgggcggtttaagggaaggttggttggtggggtattaatctttaattacctggagcacctgcctgaaatcactttttttcaggttggaccggtccaccatgagccgcaagatagaaggctttttgttattacttctctttggctatgaagccacattgggattatcgtctaccgaggatgaaggcgaggacccctggtatcaaaaagcatgcaagtgcgattgccaaggaggacccaatgctctgtggtctgcaggtgccacctccttggactgtataccagaatgcccatatcacaagcctctgggtttcgagtcaggggaggtcacaccggaccagatcacctgctctaacccggagcagtatgtgggctggtattcttcgtggactgcaaacaaggcccggctcaacagtcaaggctttgggtgtgcctggctctccaagttccaggacagtagccagtggttacagatagatctgaaggagatcaaagtgatttcagggatcctcacccaggggcgctgtgacatcgatgagtggatgaccaagtacagcgtgcagtacaggaccgatgagcgcctgaactggatttactacaaggaccagactggaaacaaccgggtcttctatggcaactcggaccgcacctccacggttcagaacctgctgcggccccccatcatctcccgcttcatccgcctcatcccgctgggctggcacgtccgcattgccatccggatggagctgctggagtgcgtcagcaagtgtgcctgaagcttctagagcctcgactgtgccttctagttgccagccatctgttgtttgcccctcccccgtgccttccttgaccctggaaggtgccactcccactgtcctttcctaataaaatgaggaaattgcatcgcattgtctgagtaggtgtcattctattctggggggtggggtggggcaggacagcaagggggaggattgggaagagaatagcaggcatgctgggga

SEQ ID NO: 225 - DNA, 215 bp, synthetic construct
  source 1..215: mol_type = other DNA
gcctcgactgtgccttctagttgccagccatctgttgtttgcccctcccccgtgccttccttgaccctggaaggtgccactcccactgtcctttcctaataaaatgaggaaattgcatcgcattgtctgagtaggtgtcattctattctggggggtggggtggggcaggacagcaagggggaggattgggaagagaatagcaggcatgctgggga

SEQ ID NO: 226 - DNA, 126 bp, synthetic construct
  source 1..126: mol_type = other DNA
gccccggctctgactgaccgcgttactcccacaggtgagcgggcggtttaagggaaggttggttggtggggtattaatctttaattacctggagcacctgcctgaaatcactttttttcaggttgg

SEQ ID NO: 227 - DNA, 128 bp, synthetic construct
  source 1..128: mol_type = other DNA
gtgagcgggcgggacggcccttctcctccgggctgtaattagctgagctttaagggaaggttggttggtggggtattaatctttaattacctggagcacctgcctgaaatcactttttttcaggttgg

SEQ ID NO: 228 - DNA, 3919 bp, synthetic construct
  source 1..3919: mol_type = other DNA
cgttacataacttacggtaaatggcccgcctggctgaccgcccaacgacccccgcccattgacgtcaatagtaacgccaatagggactttccattgacgtcaatgggtggagtatttacggtaaactgcccacttggcagtacatcaagtgtatcatatgccaagtacgccccctattgacgtcaatgacggtaaatggcccgcctggcattgtgcccagtacatgaccttatgggactttcctacttggcagtacatctacgtattagtcatcgctattaccatggtcgaggtgagccccacgttctgcttcactctccccatctcccccccctccccacccccaattttgtatttatttattttttaattattttgtgcagcgatgggggcggggggggggggggggcgcgcgccaggcggggcggggcggggcgaggggcggggcggggcgaggcggagaggtgcggcggcagccaatcagagcggcgcgctccgaaagtttccttttatggcgaggcggcggcggcggcggccctataaaaagcgaagcgcgcggcgggcgggagtcgctgcgacgctgccttcgccccgtgccccgctccgccgccgcctcgcgccgcccgccccggctctgactgaccgcgttactcccacaggtgagcgggcgggacggcccttctcctccgggctgtaattagctgagctttaagggaaggttggttggtggggtattaatctttaattacctggagcacctgcctgaaatcactttttttcaggttggaccggtccaccatgtggcgactacgtcgggccgctgtggcctgtgaggtctgccagtctttagtgaaacacagctctggaataaaaggaagtttaccactacaaaaactacatctggtttcacgaagcatttatcattcacatcatcctaccttaaagcttcaacgaccccaattaaggacatcctttcagcagttctcttctctgacaaaccttcctttacgtaaactgaaattctctccaattaaatatggctaccagcctcgcaggaatttttggccagcaagattagctacgagactcttaaaacttcgctatctcatactaggatcggctgttgggggtggctacacagccaaaaagacttttgatcagtggaaagatatgataccggaccttagtgaatataaatggattgtgcctgacattgtgtgggaaattgatgagtatatcgattttgagaaaattagaaaagcccttcctagttcagaagaccttgtaaagttagcaccagactttgacaagattgttgaaagccttagcttattgaaggacttttttacctcaggttctccggaagaaacggcgtttagagcaacagatcgtggatctgaaagtgacaagcattttagaaaggtgtcagacaaagagaaaattgaccaacttcaggaagaacttctgcacactcagttgaagtatcagagaatcttggaacgattagaaaaggagaacaaagaattgagaaaattagtattgcagaaagatgacaaaggcattcatcatagaaagcttaagaaatctttgattgacatgtattctgaagttcttgatgttctctctgattatgatgccagttataatacgcaagatcatctgccacgggttgttgtggttggagatcagagtgctggaaagactagtgtgttggaaatgattgcccaagctcgaatattcccaagaggatctggggagatgatgacacgttctccagttaaggtgactctgagtgaaggtcctcaccatgtggccctatttaaagatagttctcgggagtttgatcttaccaaagaagaggatcttgcagcattaagacatgaaatagaacttcgaatgaggaaaaatgtgaaagaaggctgtaccgttagccctgagaccatatccttaaatgtaaaaggccctggactacagaggatggtgcttgttgacttaccaggtgtgattaatactgtgacatcaggcatggctcctgacacaaaggaaactattttcagtatcagcaaagcttacatgcagaatcctaatgccatcatactgtgtattcaagatggatctgtggatgctgaacgcagtattgttacagacttggtcagtcaaatggaccctcatggaaggagaaccatattcgttttgaccaaagtagacctggcagagaaaaatgtagccagtccaagcaggattcagcagataattgaaggaaagctcttcccaatgaaagctttaggttattttgctgttgtaacaggaaaagggaacagctctgaaagcattgaagctataagagaatatgaagaagagttttttcagaattcaaagctcctaaagacaagcatgctaaaggcacaccaagtgactacaagaaatttaagccttgcagtatcagactgcttttggaaaatggtacgagagtctgttgaacaacaggctgatagtttcaaagcaacacgttttaaccttgaaactgaatggaagaataactatcctcgcctgcgggaacttgaccggaatgaactatttgaaaaagctaaaaatgaaatccttgatgaagttatcagtctgagccaggttacaccaaaacattgggaggaaatccttcaacaatctttgtgggaaagagtatcaactcatgtgattgaaaacatctaccttccagctgcgcagaccatgaattcaggaacttttaacaccacagtggatatcaagcttaaacagtggactgataaacaacttcctaataaagcagtagaggttgcttgggagaccctacaagaagaattttcccgctttatgacagaaccgaaagggaaagagcatgatgacatatttgataaacttaaagaggctgttaaggaagaaagtattaaacgacacaagtggaatgactttgcggaggacagcttgagggttattcaacacaatgctttggaagaccgatccatatctgataaacagcaatgggatgcagctatttattttatggaagaggctctgcaggctcgtctcaaggatactgaaaatgcaattgaaaacatggtgggtccagactggaaaaagaggtggttatactggaagaatcggacccaagaacagtgtgttcacaatgaaaccaagaatgaattggagaagatgttgaaatgtaatgaggagcacccagcttatcttgcaagtgatgaaataaccacagtccggaagaaccttgaatcccgaggagtagaagtagatccaagcttgattaaggatacttggcatcaagtttatagaagacattttttaaaaacagctctaaaccattgtaacctttgtcgaagaggtttttattactaccaaaggcattttgtagattctgagttggaatgcaatgatgtggtcttgttttggcgtatacagcgcatgcttgctatcaccgcaaatactttaaggcaacaacttacaaatactgaagttaggcgattagagaaaaatgttaaagaggtattggaagattttgctgaagatggtgagaagaagattaaattgcttactggtaagcgcgttcaactggcggaagacctcaagaaagttagagaaattcaagaaaaacttgatgctttcattgaagctcttcatcaggagaaataatctagaggcgcgcctgtgccttctagttgccagccatctgttgtttgcccctcccccgtgccttccttgaccctggaaggtgccactcccactgtcctttcctaataaaatgaggaaattgcatcgcattgtctgagtaggtgtcattctattctggggggtggggtggggcaggacagcaagggggaggattgggaagacaatagcaggcatgctggggatgcggtgggctctatgg

SEQ ID NO: 229 - DNA, 34 bp, synthetic construct
  source 1..34: mol_type = other DNA
gccccggctctgactgaccgcgttactcccacag

SEQ ID NO: 230 - DNA, 3939 bp, synthetic construct
  source 1..3939: mol_type = other DNA
gcggccgcacgcgtggtacccgttacataacttacggtaaatggcccgcctggctgaccgcccaacgacccccgcccattgacgtcaatagtaacgccaatagggactttccattgacgtcaatgggtggagtatttacggtaaactgcccacttggcagtacatcaagtgtatcatatgccaagtacgccccctattgacgtcaatgacggtaaatggcccgcctggcattgtgcccagtacatgaccttatgggactttcctacttggcagtacatctacgtattagtcatcgctattaccatggtcgaggtgagccccacgttctgcttcactctccccatctcccccccctccccacccccaattttgtatttatttattttttaattattttgtgcagcgatgggggcggggggggggggggggcgcgcgccaggcggggcggggcggggcgaggggcggggcggggcgaggcggagaggtgcggcggcagccaatcagagcggcgcgctccgaaagtttccttttatggcgaggcggcggcggcggcggccctataaaaagcgaagcgcgcggcgggcgggagtcgctgcgacgctgccttcgccccgtgccccgctccgccgccgcctcgcgccgcccgccccggctctgactgaccgcgttactcccacaggtgagcgggcgggacggcccttctcctccgggctgtaattagctgagctttaagggaaggttggttggtggggtattaatctttaattacctggagcacctgcctgaaatcactttttttcaggttggaccggtccaccatgtggcgactacgtcgggccgctgtggcctgtgaggtctgccagtctttagtgaaacacagctctggaataaaaggaagtttaccactacaaaaactacatctggtttcacgaagcatttatcattcacatcatcctaccttaaagcttcaacgaccccaattaaggacatcctttcagcagttctcttctctgacaaaccttcctttacgtaaactgaaattctctccaattaaatatggctaccagcctcgcaggaatttttggccagcaagattagctacgagactcttaaaacttcgctatctcatactaggatcggctgttgggggtggctacacagccaaaaagacttttgatcagtggaaagatatgataccggaccttagtgaatataaatggattgtgcctgacattgtgtgggaaattgatgagtatatcgattttgagaaaattagaaaagcccttcctagttcagaagaccttgtaaagttagcaccagactttgacaagattgttgaaagccttagcttattgaaggacttttttacctcaggttctccggaagaaacggcgtttagagcaacagatcgtggatctgaaagtgacaagcattttagaaaggtgtcagacaaagagaaaattgaccaacttcaggaagaacttctgcacactcagttgaagtatcagagaatcttggaacgattagaaaaggagaacaaagaattgagaaaattagtattgcagaaagatgacaaaggcattcatcatagaaagcttaagaaatctttgattgacatgtattctgaagttcttgatgttctctctgattatgatgccagttataatacgcaagatcatctgccacgggttgttgtggttggagatcagagtgctggaaagactagtgtgttggaaatgattgcccaagctcgaatattcccaagaggatctggggagatgatgacacgttctccagttaaggtgactctgagtgaaggtcctcaccatgtggccctatttaaagatagttctcgggagtttgatcttaccaaagaagaggatcttgcagcattaagacatgaaatagaacttcgaatgaggaaaaatgtgaaagaaggctgtaccgttagccctgagaccatatccttaaatgtaaaaggccctggactacagaggatggtgcttgttgacttaccaggtgtgattaatactgtgacatcaggcatggctcctgacacaaaggaaactattttcagtatcagcaaagcttacatgcagaatcctaatgccatcatactgtgtattcaagatggatctgtggatgctgaacgcagtattgttacagacttggtcagtcaaatggaccctcatggaaggagaaccatattcgttttgaccaaagtagacctggcagagaaaaatgtagccagtccaagcaggattcagcagataattgaaggaaagctcttcccaatgaaagctttaggttattttgctgttgtaacaggaaaagggaacagctctgaaagcattgaagctataagagaatatgaagaagagttttttcagaattcaaagctcctaaagacaagcatgctaaaggcacaccaagtgactacaagaaatttaagccttgcagtatcagactgcttttggaaaatggtacgagagtctgttgaacaacaggctgatagtttcaaagcaacacgttttaaccttgaaactgaatggaagaataactatcctcgcctgcgggaacttgaccggaatgaactatttgaaaaagctaaaaatgaaatccttgatgaagttatcagtctgagccaggttacaccaaaacattgggaggaaatccttcaacaatctttgtgggaaagagtatcaactcatgtgattgaaaacatctaccttccagctgcgcagaccatgaattcaggaacttttaacaccacagtggatatcaagcttaaacagtggactgataaacaacttcctaataaagcagtagaggttgcttgggagaccctacaagaagaattttcccgctttatgacagaaccgaaagggaaagagcatgatgacatatttgataaacttaaagaggctgttaaggaagaaagtattaaacgacacaagtggaatgactttgcggaggacagcttgagggttattcaacacaatgctttggaagaccgatccatatctgataaacagcaatgggatgcagctatttattttatggaagaggctctgcaggctcgtctcaaggatactgaaaatgcaattgaaaacatggtgggtccagactggaaaaagaggtggttatactggaagaatcggacccaagaacagtgtgttcacaatgaaaccaagaatgaattggagaagatgttgaaatgtaatgaggagcacccagcttatcttgcaagtgatgaaataaccacagtccggaagaaccttgaatcccgaggagtagaagtagatccaagcttgattaaggatacttggcatcaagtttatagaagacattttttaaaaacagctctaaaccattgtaacctttgtcgaagaggtttttattactaccaaaggcattttgtagattctgagttggaatgcaatgatgtggtcttgttttggcgtatacagcgcatgcttgctatcaccgcaaatactttaaggcaacaacttacaaatactgaagttaggcgattagagaaaaatgttaaagaggtattggaagattttgctgaagatggtgagaagaagattaaattgcttactggtaagcgcgttcaactggcggaagacctcaagaaagttagagaaattcaagaaaaacttgatgctttcattgaagctcttcatcaggagaaataatctagaggcgcgcctgtgccttctagttgccagccatctgttgtttgcccctcccccgtgccttccttgaccctggaaggtgccactcccactgtcctttcctaataaaatgaggaaattgcatcgcattgtctgagtaggtgtcattctattctggggggtggggtggggcaggacagcaagggggaggattgggaagacaatagcaggcatgctggggatgcggtgggctctatgg

SEQ ID NO: 231 - DNA, 4125 bp, synthetic construct
  source 1..4125: mol_type = other DNA
gcggccgcacgcgtggtacccgttacataacttacggtaaatggcccgcctggctgaccgcccaacgacccccgcccattgacgtcaatagtaacgccaatagggactttccattgacgtcaatgggtggagtatttacggtaaactgcccacttggcagtacatcaagtgtatcatatgccaagtacgccccctattgacgtcaatgacggtaaatggcccgcctggcattgtgcccagtacatgaccttatgggactttcctacttggcagtacatctacgtattagtcatcgctattaccatggtcgaggtgagccccacgttctgcttcactctccccatctcccccccctccccacccccaattttgtatttatttattttttaattattttgtgcagcgatgggggcggggggggggggggggcgcgcgccaggcggggcggggcggggcgaggggcggggcggggcgaggcggagaggtgcggcggcagccaatcagagcggcgcgctccgaaagtttccttttatggcgaggcggcggcggcggcggccctataaaaagcgaagcgcgcggcgggcgggagtcgctgcgacgctgccttcgccccgtgccccgctccgccgccgcctcgcgccgcccgccccggctctgactgaccgcgttactcccacaggtgagcgggcgggacggcccttctcctccgggctgtaattagctgagctttaagggaaggttggttggtggggtattaatctttaattacctggagcacctgcctgaaatcactttttttcaggttggaccggtccaccatgtggcgactacgtcgggccgctgtggcctgtgaggtctgccagtctttagtgaaacacagctctggaataaaaggaagtttaccactacaaaaactacatctggtttcacgaagcatttatcattcacatcatcctaccttaaagcttcaacgaccccaattaaggacatcctttcagcagttctcttctctgacaaaccttcctttacgtaaactgaaattctctccaattaaatatggctaccagcctcgcaggaatttttggccagcaagattagctacgagactcttaaaacttcgctatctcatactaggatcggctgttgggggtggctacacagccaaaaagacttttgatcagtggaaagatatgataccggaccttagtgaatataaatggattgtgcctgacattgtgtgggaaattgatgagtatatcgattttgagaaaattagaaaagcccttcctagttcagaagaccttgtaaagttagcaccagactttgacaagattgttgaaagccttagcttattgaaggacttttttacctcaggttctccggaagaaacggcgtttagagcaacagatcgtggatctgaaagtgacaagcattttagaaaggtgtcagacaaagagaaaattgaccaacttcaggaagaacttctgcacactcagttgaagtatcagagaatcttggaacgattagaaaaggagaacaaagaattgagaaaattagtattgcagaaagatgacaaaggcattcatcatagaaagcttaagaaatctttgattgacatgtattctgaagttcttgatgttctctctgattatgatgccagttataatacgcaagatcatctgccacgggttgttgtggttggagatcagagtgctggaaagactagtgtgttggaaatgattgcccaagctcgaatattcccaagaggatctggggagatgatgacacgttctccagttaaggtgactctgagtgaaggtcctcaccatgtggccctatttaaagatagttctcgggagtttgatcttaccaaagaagaggatcttgcagcattaagacatgaaatagaacttcgaatgaggaaaaatgtgaaagaaggctgtaccgttagccctgagaccatatccttaaatgtaaaaggccctggactacagaggatggtgcttgttgacttaccaggtgtgattaatactgtgacatcaggcatggctcctgacacaaaggaaactattttcagtatcagcaaagcttacatgcagaatcctaatgccatcatactgtgtattcaagatggatctgtggatgctgaacgcagtattgttacagacttggtcagtcaaatggaccctcatggaaggagaaccatattcgttttgaccaaagtagacctggcagagaaaaatgtagccagtccaagcaggattcagcagataattgaaggaaagctcttcccaatgaaagctttaggttattttgctgttgtaacaggaaaagggaacagctctgaaagcattgaagctataagagaatatgaagaagagttttttcagaattcaaagctcctaaagacaagcatgctaaaggcacaccaagtgactacaagaaatttaagccttgcagtatcagactgcttttggaaaatggtacgagagtctgttgaacaacaggctgatagtttcaaagcaacacgttttaaccttgaaactgaatggaagaataactatcctcgcctgcgggaacttgaccggaatgaactatttgaaaaagctaaaaatgaaatccttgatgaagttatcagtctgagccaggttacaccaaaacattgggaggaaatccttcaacaatctttgtgggaaagagtatcaactcatgtgattgaaaacatctaccttccagctgcgcagaccatgaattcaggaacttttaacaccacagtggatatcaagcttaaacagtggactgataaacaacttcctaataaagcagtagaggttgcttgggagaccctacaagaagaattttcccgctttatgacagaaccgaaagggaaagagcatgatgacatatttgataaacttaaagaggctgttaaggaagaaagtattaaacgacacaagtggaatgactttgcggaggacagcttgagggttattcaacacaatgctttggaagaccgatccatatctgataaacagcaatgggatgcagctatttattttatggaagaggctctgcaggctcgtctcaaggatactgaaaatgcaattgaaaacatggtgggtccagactggaaaaagaggtggttatactggaagaatcggacccaagaacagtgtgttcacaatgaaaccaagaatgaattggagaagatgttgaaatgtaatgaggagcacccagcttatcttgcaagtgatgaaataaccacagtccggaagaaccttgaatcccgaggagtagaagtagatccaagcttgattaaggatacttggcatcaagtttatagaagacattttttaaaaacagctctaaaccattgtaacctttgtcgaagaggtttttattactaccaaaggcattttgtagattctgagttggaatgcaatgatgtggtcttgttttggcgtatacagcgcatgcttgctatcaccgcaaatactttaaggcaacaacttacaaatactgaagttaggcgattagagaaaaatgttaaagaggtattggaagattttgctgaagatggtgagaagaagattaaattgcttactggtaagcgcgttcaactggcggaagacctcaagaaagttagagaaattcaagaaaaacttgatgctttcattgaagctcttcatcaggagaaataatctagagcctcgactgtgccttctagttgccagccatctgttgtttgcccctcccccgtgccttccttgaccctggaaggtgccactcccactgtcctttcctaataaaatgaggaaattgcatcgcattgtctgagtaggtgtcattctattctggggggtggggtggggcaggacagcaagggggaggattgggaagagaatagcaggcatgctggggaaaaatttagggttagggttagggttagggaaaaatttagggttagggttagggttagggaaaaatttagggttagggttagggttagggaaaaacgcgtttttccctaaccctaaccctaaccctaaatttttccctaaccctaaccctaaccctaaatttttccctaaccctaaccctaaccctaaagcgcgctagatctga

SEQ ID NO: 232 - DNA, 4302 bp, synthetic construct
  source 1..4302: mol_type = other DNA
gcggccgcacgcgtggtacccaaaccatctgattcaacaatgcacgaccgatctcttatgggcttggcacacaccatctgcccattataaacgtctgcaaagaccaaggtttgatatgttgattttactgtcagccttaagagtgcgacatctgctaatttagtgtaataatacaatcagtagaccctttaaaacaagtcccttggcttggaacaacgccaggctcctcaacaggcaactttgctacttctacagaaaatgataataaagaaatgctggtgaagtcaaatgcttatcacaatggtgaactactcagcagggaggctctaataggcgccaagagcctagacttccttaagcgccagagtccacaagggcccagttaatcctcaacattcaaatgctgcccacaaaaccagcccctctgtgccctagccgcctcttttttccaagtgacagtagaactccaccaatccgcagctgaatggggtccgcctcttttccctgcctaaacagacaggaactcctgccaattgagggcgtcaccgctaaggctccgccccagcctgggctccacaaccaatgaagggtaatctcgacaaagagcaaggggtggggcgcgggcgcgcaggtgcagcagcacacaggctggtcgggagggcggggcgcgacgtctgccgtgcggggtcccggcatcggttgcgcgcgcgctccctcctctcggagagagggctgtggtaaaacccgtccggaaaagctagcggagtcgctgcgacgctgccttcgccccgtgccccgctccgccgccgcctcgcgccgcccgccccggctctgactgaccgcgttactcccacaggtgagcgggcgggacggcccttctcctccgggctgtaattagctgagctttaagggaaggttggttggtggggtattaatctttaattacctggagcacctgcctgaaatcactttttttcaggttggaccggtccaccatgtggcgactacgtcgggccgctgtggcctgtgaggtctgccagtctttagtgaaacacagctctggaataaaaggaagtttaccactacaaaaactacatctggtttcacgaagcatttatcattcacatcatcctaccttaaagcttcaacgaccccaattaaggacatcctttcagcagttctcttctctgacaaaccttcctttacgtaaactgaaattctctccaattaaatatggctaccagcctcgcaggaatttttggccagcaagattagctacgagactcttaaaacttcgctatctcatactaggatcggctgttgggggtggctacacagccaaaaagacttttgatcagtggaaagatatgataccggaccttagtgaatataaatggattgtgcctgacattgtgtgggaaattgatgagtatatcgattttgagaaaattagaaaagcccttcctagttcagaagaccttgtaaagttagcaccagactttgacaagattgttgaaagccttagcttattgaaggacttttttacctcaggttctccggaagaaacggcgtttagagcaacagatcgtggatctgaaagtgacaagcattttagaaaggtgtcagacaaagagaaaattgaccaacttcaggaagaacttctgcacactcagttgaagtatcagagaatcttggaacgattagaaaaggagaacaaagaattgagaaaattagtattgcagaaagatgacaaaggcattcatcatagaaagcttaagaaatctttgattgacatgtattctgaagttcttgatgttctctctgattatgatgccagttataatacgcaagatcatctgccacgggttgttgtggttggagatcagagtgctggaaagactagtgtgttggaaatgattgcccaagctcgaatattcccaagaggatctggggagatgatgacacgttctccagttaaggtgactctgagtgaaggtcctcaccatgtggccctatttaaagatagttctcgggagtttgatcttaccaaagaagaggatcttgcagcattaagacatgaaatagaacttcgaatgaggaaaaatgtgaaagaaggctgtaccgttagccctgagaccatatccttaaatgtaaaaggccctggactacagaggatggtgcttgttgacttaccaggtgtgattaatactgtgacatcaggcatggctcctgacacaaaggaaactattttcagtatcagcaaagcttacatgcagaatcctaatgccatcatactgtgtattcaagatggatctgtggatgctgaacgcagtattgttacagacttggtcagtcaaatggaccctcatggaaggagaaccatattcgttttgaccaaagtagacctggcagagaaaaatgtagccagtccaagcaggattcagcagataattgaaggaaagctcttcccaatgaaagctttaggttattttgctgttgtaacaggaaaagggaacagctctgaaagcattgaagctataagagaatatgaagaagagttttttcagaattcaaagctcctaaagacaagcatgctaaaggcacaccaagtgactacaagaaatttaagccttgcagtatcagactgcttttggaaaatggtacgagagtctgttgaacaacaggctgatagtttcaaagcaacacgttttaaccttgaaactgaatggaagaataactatcctcgcctgcgggaacttgaccggaatgaactatttgaaaaagctaaaaatgaaatccttgatgaagttatcagtctgagccaggttacaccaaaacattgggaggaaatccttcaacaatctttgtgggaaagagtatcaactcatgtgattgaaaacatctaccttccagctgcgcagaccatgaattcaggaacttttaacaccacagtggatatcaagcttaaacagtggactgataaacaacttcctaataaagcagtagaggttgcttgggagaccctacaagaagaattttcccgctttatgacagaaccgaaagggaaagagcatgatgacatatttgataaacttaaagaggctgttaaggaagaaagtattaaacgacacaagtggaatgactttgcggaggacagcttgagggttattcaacacaatgctttggaagaccgatccatatctgataaacagcaatgggatgcagctatttattttatggaagaggctctgcaggctcgtctcaaggatactgaaaatgcaattgaaaacatggtgggtccagactggaaaaagaggtggttatactggaagaatcggacccaagaacagtgtgttcacaatgaaaccaagaatgaattggagaagatgttgaaatgtaatgaggagcacccagcttatcttgcaagtgatgaaataaccacagtccggaagaaccttgaatcccgaggagtagaagtagatccaagcttgattaaggatacttggcatcaagtttatagaagacattttttaaaaacagctctaaaccattgtaacctttgtcgaagaggtttttattactaccaaaggcattttgtagattctgagttggaatgcaatgatgtggtcttgttttggcgtatacagcgcatgcttgctatcaccgcaaatactttaaggcaacaacttacaaatactgaagttaggcgattagagaaaaatgttaaagaggtattggaagattttgctgaagatggtgagaagaagattaaattgcttactggtaagcgcgttcaactggcggaagacctcaagaaagttagagaaattcaagaaaaacttgatgctttcattgaagctcttcatcaggagaaataatctagagcctcgactgtgccttctagttgccagccatctgttgtttgcccctcccccgtgccttccttgaccctggaaggtgccactcccactgtcctttcctaataaaatgaggaaattgcatcgcattgtctgagtaggtgtcattctattctggggggtggggtggggcaggacagcaagggggaggattgggaagagaatagcaggcatgctggggaaaaatttagggttagggttagggttagggaaaaatttagggttagggttagggttagggaaaaatttagggttagggttagggttagggaaaaacgcgtttttccctaaccctaaccctaaccctaaatttttccctaaccctaaccctaaccctaaatttttccctaaccctaaccctaaccctaaagcgcgctagatctga

SEQ ID NO: 233 - DNA, 4149 bp, synthetic construct
  source 1..4149: mol_type = other DNA
cagatctatgtgagcaaacagcagcatgctggggaaaaatttagggttagggttagggttagggaaaaatttagggttagggttagggttagggaaaaatttagggttagggttagggttagggaaaaacgcgtggtacccgttacataacttacggtaaatggcccgcctggctgaccgcccaacgacccccgcccattgacgtcaatagtaacgccaatagggactttccattgacgtcaatgggtggagtatttacggtaaactgcccacttggcagtacatcaagtgtatcatatgccaagtacgccccctattgacgtcaatgacggtaaatggcccgcctggcattgtgcccagtacatgaccttatgggactttcctacttggcagtacatctacgtattagtcatcgctattaccatggtcgaggtgagccccacgttctgcttcactctccccatctcccccccctccccacccccaattttgtatttatttattttttaattattttgtgcagcgatgggggcggggggggggggggggcgcgcgccaggcggggcggggcggggcgaggggcggggcggggcgaggcggagaggtgcggcggcagccaatcagagcggcgcgctccgaaagtttccttttatggcgaggcggcggcggcggcggccctataaaaagcgaagcgcgcggcgggcgggagtcgctgcgacgctgccttcgccccgtgccccgctccgccgccgcctcgcgccgcccgccccggctctgactgaccgcgttactcccacaggtgagcgggcgggacggcccttctcctccgggctgtaattagctgagctttaagggaaggttggttggtggggtattaatctttaattacctggagcacctgcctgaaatcactttttttcaggttggaccggtccaccatgtggcgactacgtcgggccgctgtggcctgtgaggtctgccagtctttagtgaaacacagctctggaataaaaggaagtttaccactacaaaaactacatctggtttcacgaagcatttatcattcacatcatcctaccttaaagcttcaacgaccccaattaaggacatcctttcagcagttctcttctctgacaaaccttcctttacgtaaactgaaattctctccaattaaatatggctaccagcctcgcaggaatttttggccagcaagattagctacgagactcttaaaacttcgctatctcatactaggatcggctgttgggggtggctacacagccaaaaagacttttgatcagtggaaagatatgataccggaccttagtgaatataaatggattgtgcctgacattgtgtgggaaattgatgagtatatcgattttgagaaaattagaaaagcccttcctagttcagaagaccttgtaaagttagcaccagactttgacaagattgttgaaagccttagcttattgaaggacttttttacctcaggttctccggaagaaacggcgtttagagcaacagatcgtggatctgaaagtgacaagcattttagaaaggtgtcagacaaagagaaaattgaccaacttcaggaagaacttctgcacactcagttgaagtatcagagaatcttggaacgattagaaaaggagaacaaagaattgagaaaattagtattgcagaaagatgacaaaggcattcatcatagaaagcttaagaaatctttgattgacatgtattctgaagttcttgatgttctctctgattatgatgccagttataatacgcaagatcatctgccacgggttgttgtggttggagatcagagtgctggaaagactagtgtgttggaaatgattgcccaagctcgaatattcccaagaggatctggggagatgatgacacgttctccagttaaggtgactctgagtgaaggtcctcaccatgtggccctatttaaagatagttctcgggagtttgatcttaccaaagaagaggatcttgcagcattaagacatgaaatagaacttcgaatgaggaaaaatgtgaaagaaggctgtaccgttagccctgagaccatatccttaaatgtaaaaggccctggactacagaggatggtgcttgttgacttaccaggtgtgattaatactgtgacatcaggcatggctcctgacacaaaggaaactattttcagtatcagcaaagcttacatgcagaatcctaatgccatcatactgtgtattcaagatggatctgtggatgctgaacgcagtattgttacagacttggtcagtcaaatggaccctcatggaaggagaaccatattcgttttgaccaaagtagacctggcagagaaaaatgtagccagtccaagcaggattcagcagataattgaaggaaagctcttcccaatgaaagctttaggttattttgctgttgtaacaggaaaagggaacagctctgaaagcattgaagctataagagaatatgaagaagagttttttcagaattcaaagctcctaaagacaagcatgctaaaggcacaccaagtgactacaagaaatttaagccttgcagtatcagactgcttttggaaaatggtacgagagtctgttgaacaacaggctgatagtttcaaagcaacacgttttaaccttgaaactgaatggaagaataactatcctcgcctgcgggaacttgaccggaatgaactatttgaaaaagctaaaaatgaaatccttgatgaagttatcagtctgagccaggttacaccaaaacattgggaggaaatccttcaacaatctttgtgggaaagagtatcaactcatgtgattgaaaacatctaccttccagctgcgcagaccatgaattcaggaacttttaacaccacagtggatatcaagcttaaacagtggactgataaacaacttcctaataaagcagtagaggttgcttgggagaccctacaagaagaattttcccgctttatgacagaaccgaaagggaaagagcatgatgacatatttgataaacttaaagaggctgttaaggaagaaagtattaaacgacacaagtggaatgactttgcggaggacagcttgagggttattcaacacaatgctttggaagaccgatccatatctgataaacagcaatgggatgcagctatttattttatggaagaggctctgcaggctcgtctcaaggatactgaaaatgcaattgaaaacatggtgggtccagactggaaaaagaggtggttatactggaagaatcggacccaagaacagtgtgttcacaatgaaaccaagaatgaattggagaagatgttgaaatgtaatgaggagcacccagcttatcttgcaagtgatgaaataaccacagtccggaagaaccttgaatcccgaggagtagaagtagatccaagcttgattaaggatacttggcatcaagtttatagaagacattttttaaaaacagctctaaaccattgtaacctttgtcgaagaggtttttattactaccaaaggcattttgtagattctgagttggaatgcaatgatgtggtcttgttttggcgtatacagcgcatgcttgctatcaccgcaaatactttaaggcaacaacttacaaatactgaagttaggcgattagagaaaaatgttaaagaggtattggaagattttgctgaagatggtgagaagaagattaaattgcttactggtaagcgcgttcaactggcggaagacctcaagaaagttagagaaattcaagaaaaacttgatgctttcattgaagctcttcatcaggagaaataatctagagcctcgactgtgccttctagttgccagccatctgttgtttgcccctcccccgtgccttccttgaccctggaaggtgccactcccactgtcctttcctaataaaatgaggaaattgcatcgcattgtctgagtaggtgtcattctattctggggggtggggtggggcaggacagcaagggggaggattgggaagagaatagcaggcatgctggggatcctttttccctaaccctaaccctaaccctaaatttttccctaaccctaaccctaaccctaaatttttccctaaccctaaccctaaccctaaatttttgcggccgca

SEQ ID NO: 234 - DNA, 4326 bp, synthetic construct
  source 1..4326: mol_type = other DNA
cagatctatgtgagcaaacagcagcatgctggggaaaaatttagggttagggttagggttagggaaaaatttagggttagggttagggttagggaaaaatttagggttagggttagggttagggaaaaacgcgtggtacccaaaccatctgattcaacaatgcacgaccgatctcttatgggcttggcacacaccatctgcccattataaacgtctgcaaagaccaaggtttgatatgttgattttactgtcagccttaagagtgcgacatctgctaatttagtgtaataatacaatcagtagaccctttaaaacaagtcccttggcttggaacaacgccaggctcctcaacaggcaactttgctacttctacagaaaatgataataaagaaatgctggtgaagtcaaatgcttatcacaatggtgaactactcagcagggaggctctaataggcgccaagagcctagacttccttaagcgccagagtccacaagggcccagttaatcctcaacattcaaatgctgcccacaaaaccagcccctctgtgccctagccgcctcttttttccaagtgacagtagaactccaccaatccgcagctgaatggggtccgcctcttttccctgcctaaacagacaggaactcctgccaattgagggcgtcaccgctaaggctccgccccagcctgggctccacaaccaatgaagggtaatctcgacaaagagcaaggggtggggcgcgggcgcgcaggtgcagcagcacacaggctggtcgggagggcggggcgcgacgtctgccgtgcggggtcccggcatcggttgcgcgcgcgctccctcctctcggagagagggctgtggtaaaacccgtccggaaaagctagcggagtcgctgcgacgctgccttcgccccgtgccccgctccgccgccgcctcgcgccgcccgccccggctctgactgaccgcgttactcccacaggtgagcgggcgggacggcccttctcctccgggctgtaattagctgagctttaagggaaggttggttggtggggtattaatctttaattacctggagcacctgcctgaaatcactttttttcaggttggaccggtccaccatgtggcgactacgtcgggccgctgtggcctgtgaggtctgccagtctttagtgaaacacagctctggaataaaaggaagtttaccactacaaaaactacatctggtttcacgaagcatttatcattcacatcatcctaccttaaagcttcaacgaccccaattaaggacatcctttcagcagttctcttctctgacaaaccttcctttacgtaaactgaaattctctccaattaaatatggctaccagcctcgcaggaatttttggccagcaagattagctacgagactcttaaaacttcgctatctcatactaggatcggctgttgggggtggctacacagccaaaaagacttttgatcagtggaaagatatgataccggaccttagtgaatataaatggattgtgcctgacattgtgtgggaaattgatgagtatatcgattttgagaaaattagaaaagcccttcctagttcagaagaccttgtaaagttagcaccagactttgacaagattgttgaaagccttagcttattgaaggacttttttacctcaggttctccggaagaaacggcgtttagagcaacagatcgtggatctgaaagtgacaagcattttagaaaggtgtcagacaaagagaaaattgaccaacttcaggaagaacttctgcacactcagttgaagtatcagagaatcttggaacgattagaaaaggagaacaaagaattgagaaaattagtattgcagaaagatgacaaaggcattcatcatagaaagcttaagaaatctttgattgacatgtattctgaagttcttgatgttctctctgattatgatgccagttataatacgcaagatcatctgccacgggttgttgtggttggagatcagagtgctggaaagactagtgtgttggaaatgattgcccaagctcgaatattcccaagaggatctggggagatgatgacacgttctccagttaaggtgactctgagtgaaggtcctcaccatgtggccctatttaaagatagttctcgggagtttgatcttaccaaagaagaggatcttgcagcattaagacatgaaatagaacttcgaatgaggaaaaatgtgaaagaaggctgtaccgttagccctgagaccatatccttaaatgtaaaaggccctggactacagaggatggtgcttgttgacttaccaggtgtgattaatactgtgacatcaggcatggctcctgacacaaaggaaactattttcagtatcagcaaagcttacatgcagaatcctaatgccatcatactgtgtattcaagatggatctgtggatgctgaacgcagtattgttacagacttggtcagtcaaatggaccctcatggaaggagaaccatattcgttttgaccaaagtagacctggcagagaaaaatgtagccagtccaagcaggattcagcagataattgaaggaaagctcttcccaatgaaagctttaggttattttgctgttgtaacaggaaaagggaacagctctgaaagcattgaagctataagagaatatgaagaagagttttttcagaattcaaagctcctaaagacaagcatgctaaaggcacaccaagtgactacaagaaatttaagccttgcagtatcagactgcttttggaaaatggtacgagagtctgttgaacaacaggctgatagtttcaaagcaacacgttttaaccttgaaactgaatggaagaataactatcctcgcctgcgggaacttgaccggaatgaactatttgaaaaagctaaaaatgaaatccttgatgaagttatcagtctgagccaggttacaccaaaacattgggaggaaatccttcaacaatctttgtgggaaagagtatcaactcatgtgattgaaaacatctaccttccagctgcgcagaccatgaattcaggaacttttaacaccacagtggatatcaagcttaaacagtggactgataaacaacttcctaataaagcagtagaggttgcttgggagaccctacaagaagaattttcccgctttatgacagaaccgaaagggaaagagcatgatgacatatttgataaacttaaagaggctgttaaggaagaaagtattaaacgacacaagtggaatgactttgcggaggacagcttgagggttattcaacacaatgctttggaagaccgatccatatctgataaacagcaatgggatgcagctatttattttatggaagaggctctgcaggctcgtctcaaggatactgaaaatgcaattgaaaacatggtgggtccagactggaaaaagaggtggttatactggaagaatcggacccaagaacagtgtgttcacaatgaaaccaagaatgaattggagaagatgttgaaatgtaatgaggagcacccagcttatcttgcaagtgatgaaataaccacagtccggaagaaccttgaatcccgaggagtagaagtagatccaagcttgattaaggatacttggcatcaagtttatagaagacattttttaaaaacagctctaaaccattgtaacctttgtcgaagaggtttttattactaccaaaggcattttgtagattctgagttggaatgcaatgatgtggtcttgttttggcgtatacagcgcatgcttgctatcaccgcaaatactttaaggcaacaacttacaaatactgaagttaggcgattagagaaaaatgttaaagaggtattggaagattttgctgaagatggtgagaagaagattaaattgcttactggtaagcgcgttcaactggcggaagacctcaagaaagttagagaaattcaagaaaaacttgatgctttcattgaagctcttcatcaggagaaataatctagagcctcgactgtgccttctagttgccagccatctgttgtttgcccctcccccgtgccttccttgaccctggaaggtgccactcccactgtcctttcctaataaaatgaggaaattgcatcgcattgtctgagtaggtgtcattctattctggggggtggggtggggcaggacagcaagggggaggattgggaagagaatagcaggcatgctggggatcctttttccctaaccctaaccctaaccctaaatttttccctaaccctaaccctaaccctaaatttttccctaaccctaaccctaaccctaaatttttgcggccgca

SEQ ID NO: 235 - DNA, 4116 bp, synthetic construct
  source 1..4116: mol_type = other DNA
cagatctatgtgagcaaacagcagcatgctggggaaaaatttagggttagggttagggttagggaaaaatttagggttagggttagggttagggaaaaatttagggttagggttagggttagggaaaaacgcgtggtacccgttacataacttacggtaaatggcccgcctggctgaccgcccaacgacccccgcccattgacgtcaatagtaacgccaatagggactttccattgacgtcaatgggtggagtatttacggtaaactgcccacttggcagtacatcaagtgtatcatatgccaagtacgccccctattgacgtcaatgacggtaaatggcccgcctggcattgtgcccagtacatgaccttatgggactttcctacttggcagtacatctacgtattagtcatcgctattaccatggtcgaggtgagccccacgttctgcttcactctccccatctcccccccctccccacccccaattttgtatttatttattttttaattattttgtgcagcgatgggggcggggggggggggggggcgcgcgccaggcggggcggggcggggcgaggggcggggcggggcgaggcggagaggtgcggcggcagccaatcagagcggcgcgctccgaaagtttccttttatggcgaggcggcggcggcggcggccctataaaaagcgaagcgcgcggcgggcgggagtcgctgcgacgctgccttcgccccgtgccccgctccgccgccgcctcgcgccgcccgccccggctctgactgaccgcgttactcccacaggtgagcgggcgggacggcccttctcctccgggctgtaattagctgagctttaagggaaggttggttggtggggtattaatctttaattacctggagcacctgcctgaaatcactttttttcaggttggaccggtccaccatgtggcgactacgtcgggccgctgtggcctgtgaggtctgccagtctttagtgaaacacagctctggaataaaaggaagtttaccactacaaaaactacatctggtttcacgaagcatttatcattcacatcatcctaccttaaagcttcaacgaccccaattaaggacatcctttcagcagttctcttctctgacaaaccttcctttacgtaaactgaaattctctccaattaaatatggctaccagcctcgcaggaatttttggccagcaagattagctacgagactcttaaaacttcgctatctcatactaggatcggctgttgggggtggctacacagccaaaaagacttttgatcagtggaaagatatgataccggaccttagtgaatataaatggattgtgcctgacattgtgtgggaaattgatgagtatatcgattttgagaaaattagaaaagcccttcctagttcagaagaccttgtaaagttagcaccagactttgacaagattgttgaaagccttagcttattgaaggacttttttacctcaggttctccggaagaaagtgacaagcattttagaaaggtgtcagacaaagagaaaattgaccaacttcaggaagaacttctgcacactcagttgaagtatcagagaatcttggaacgattagaaaaggagaacaaagaattgagaaaattagtattgcagaaagatgacaaaggcattcatcatagaaagcttaagaaatctttgattgacatgtattctgaagttcttgatgttctctctgattatgatgccagttataatacgcaagatcatctgccacgggttgttgtggttggagatcagagtgctggaaagactagtgtgttggaaatgattgcccaagctcgaatattcccaagaggatctggggagatgatgacacgttctccagttaaggtgactctgagtgaaggtcctcaccatgtggccctatttaaagatagttctcgggagtttgatcttaccaaagaagaggatcttgcagcattaagacatgaaatagaacttcgaatgaggaaaaatgtgaaagaaggctgtaccgttagccctgagaccatatccttaaatgtaaaaggccctggactacagaggatggtgcttgttgacttaccaggtgtgattaatactgtgacatcaggcatggctcctgacacaaaggaaactattttcagtatcagcaaagcttacatgcagaatcctaatgccatcatactgtgtattcaagatggatctgtggatgctgaacgcagtattgttacagacttggtcagtcaaatggaccctcatggaaggagaaccatattcgttttgaccaaagtagacctggcagagaaaaatgtagccagtccaagcaggattcagcagataattgaaggaaagctcttcccaatgaaagctttaggttattttgctgttgtaacaggaaaagggaacagctctgaaagcattgaagctataagagaatatgaagaagagttttttcagaattcaaagctcctaaagacaagcatgctaaaggcacaccaagtgactacaagaaatttaagccttgcagtatcagactgcttttggaaaatggtacgagagtctgttgaacaacaggctgatagtttcaaagcaacacgttttaaccttgaaactgaatggaagaataactatcctcgcctgcgggaacttgaccggaatgaactatttgaaaaagctaaaaatgaaatccttgatgaagttatcagtctgagccaggttacaccaaaacattgggaggaaatccttcaacaatctttgtgggaaagagtatcaactcatgtgattgaaaacatctaccttccagctgcgcagaccatgaattcaggaacttttaacaccacagtggatatcaagcttaaacagtggactgataaacaacttcctaataaagcagtagaggttgcttgggagaccctacaagaagaattttcccgctttatgacagaaccgaaagggaaagagcatgatgacatatttgataaacttaaagaggctgttaaggaagaaagtattaaacgacacaagtggaatgactttgcggaggacagcttgagggttattcaacacaatgctttggaagaccgatccatatctgataaacagcaatgggatgcagctatttattttatggaagaggctctgcaggctcgtctcaaggatactgaaaatgcaattgaaaacatggtgggtccagactggaaaaagaggtggttatactggaagaatcggacccaagaacagtgtgttcacaatgaaaccaagaatgaattggagaagatgttgaaatgtaatgaggagcacccagcttatcttgcaagtgatgaaataaccacagtccggaagaaccttgaatcccgaggagtagaagtagatccaagcttgattaaggatacttggcatcaagtttatagaagacattttttaaaaacagctctaaaccattgtaacctttgtcgaagaggtttttattactaccaaaggcattttgtagattctgagttggaatgcaatgatgtggtcttgttttggcgtatacagcgcatgcttgctatcaccgcaaatactttaaggcaacaacttacaaatactgaagttaggcgattagagaaaaatgttaaagaggtattggaagattttgctgaagatggtgagaagaagattaaattgcttactggtaagcgcgttcaactggcggaagacctcaagaaagttagagaaattcaagaaaaacttgatgctttcattgaagctcttcatcaggagaaataatctagagcctcgactgtgccttctagttgccagccatctgttgtttgcccctcccccgtgccttccttgaccctggaaggtgccactcccactgtcctttcctaataaaatgaggaaattgcatcgcattgtctgagtaggtgtcattctattctggggggtggggtggggcaggacagcaagggggaggattgggaagagaatagcaggcatgctggggatcctttttccctaaccctaaccctaaccctaaatttttccctaaccctaaccctaaccctaaatttttccctaaccctaaccctaaccctaaatttttgcggccgca

SEQ ID NO: 236 - DNA, 4260 bp, synthetic construct
  source 1..4260: mol_type = other DNA
cagatctatgtgagcaaacagcagcatgctggggaaaaatttagggttagggttagggttagggaaaaatttagggttagggttagggttagggaaaaatttagggttagggttagggttagggaaaaacgcgtggtacccgttacataacttacggtaaatggcccgcctggctgaccgcccaacgacccccgcccattgacgtcaatagtaacgccaatagggactttccattgacgtcaatgggtggagtatttacggtaaactgcccacttggcagtacatcaagtgtatcatatgccaagtacgccccctattgacgtcaatgacggtaaatggcccgcctggcattgtgcccagtacatgaccttatgggactttcctacttggcagtacatctacgtattagtcatcgctattaccatggtcgaggtgagccccacgttctgcttcactctccccatctcccccccctccccacccccaattttgtatttatttattttttaattattttgtgcagcgatgggggcggggggggggggggggcgcgcgccaggcggggcggggcggggcgaggggcggggcggggcgaggcggagaggtgcggcggcagccaatcagagcggcgcgctccgaaagtttccttttatggcgaggcggcggcggcggcggccctataaaaagcgaagcgcgcggcgggcgggagtcgctgcgacgctgccttcgccccgtgccccgctccgccgccgcctcgcgccgcccgccccggctctgactgaccgcgttactcccacaggtgagcgggcgggacggcccttctcctccgggctgtaattagctgagctttaagggaaggttggttggtggggtattaatctttaattacctggagcacctgcctgaaatcactttttttcaggttggaccggtccaccatgtggcgactacgtcgggccgctgtggcctgtgaggtctgccagtctttagtgaaacacagctctggaataaaaggaagtttaccactacaaaaactacatctggtttcacgaagcatttatcattcacatcatcctaccttaaagcttcaacgaccccaattaaggacatcctttcagcagttctcttctctgacaaaccttcctttacgtaaactgaaattctctccaattaaatatggctaccagcctcgcaggaatttttggccagcaagattagctacgagactcttaaaacttcgctatctcatactaggatcggctgttgggggtggctacacagccaaaaagacttttgatcagtggaaagatatgataccggaccttagtgaatataaatggattgtgcctgacattgtgtgggaaattgatgagtatatcgattttgagaaaattagaaaagcccttcctagttcagaagaccttgtaaagttagcaccagactttgacaagattgttgaaagccttagcttattgaaggacttttttacctcaggttctccggaagaaacggcgtttagagcaacagatcgtggatctgaaagtgacaagcattttagaaagggtctgcttggtgagctcattctcttacaacaacaaattcaagagcatgaagaggaagcgcgcagagccgctggccaatatagcacgagctatgcccaacagaagcgcaaggtgtcagacaaagagaaaattgaccaacttcaggaagaacttctgcacactcagttgaagtatcagagaatcttggaacgattagaaaaggagaacaaagaattgagaaaattagtattgcagaaagatgacaaaggcattcatcatagaaagcttaagaaatctttgattgacatgtattctgaagttcttgatgttctctctgattatgatgccagttataatacgcaagatcatctgccacgggttgttgtggttggagatcagagtgctggaaagactagtgtgttggaaatgattgcccaagctcgaatattcccaagaggatctggggagatgatgacacgttctccagttaaggtgactctgagtgaaggtcctcaccatgtggccctatttaaagatagttctcgggagtttgatcttaccaaagaagaggatcttgcagcattaagacatgaaatagaacttcgaatgaggaaaaatgtgaaagaaggctgtaccgttagccctgagaccatatccttaaatgtaaaaggccctggactacagaggatggtgcttgttgacttaccaggtgtgattaatactgtgacatcaggcatggctcctgacacaaaggaaactattttcagtatcagcaaagcttacatgcagaatcctaatgccatcatactgtgtattcaagatggatctgtggatgctgaacgcagtattgttacagacttggtcagtcaaatggaccctcatggaaggagaaccatattcgttttgaccaaagtagacctggcagagaaaaatgtagccagtccaagcaggattcagcagataattgaaggaaagctcttcccaatgaaagctttaggttattttgctgttgtaacaggaaaagggaacagctctgaaagcattgaagctataagagaatatgaagaagagttttttcagaattcaaagctcctaaagacaagcatgctaaaggcacaccaagtgactacaagaaatttaagccttgcagtatcagactgcttttggaaaatggtacgagagtctgttgaacaacaggctgatagtttcaaagcaacacgttttaaccttgaaactgaatggaagaataactatcctcgcctgcgggaacttgaccggaatgaactatttgaaaaagctaaaaatgaaatccttgatgaagttatcagtctgagccaggttacaccaaaacattgggaggaaatccttcaacaatctttgtgggaaagagtatcaactcatgtgattgaaaacatctaccttccagctgcgcagaccatgaattcaggaacttttaacaccacagtggatatcaagcttaaacagtggactgataaacaacttcctaataaagcagtagaggttgcttgggagaccctacaagaagaattttcccgctttatgacagaaccgaaagggaaagagcatgatgacatatttgataaacttaaagaggctgttaaggaagaaagtattaaacgacacaagtggaatgactttgcggaggacagcttgagggttattcaacacaatgctttggaagaccgatccatatctgataaacagcaatgggatgcagctatttattttatggaagaggctctgcaggctcgtctcaaggatactgaaaatgcaattgaaaacatggtgggtccagactggaaaaagaggtggttatactggaagaatcggacccaagaacagtgtgttcacaatgaaaccaagaatgaattggagaagatgttgaaatgtaatgaggagcacccagcttatcttgcaagtgatgaaataaccacagtccggaagaaccttgaatcccgaggagtagaagtagatccaagcttgattaaggatacttggcatcaagtttatagaagacattttttaaaaacagctctaaaccattgtaacctttgtcgaagaggtttttattactaccaaaggcattttgtagattctgagttggaatgcaatgatgtggtcttgttttggcgtatacagcgcatgcttgctatcaccgcaaatactttaaggcaacaacttacaaatactgaagttaggcgattagagaaaaatgttaaagaggtattggaagattttgctgaagatggtgagaagaagattaaattgcttactggtaagcgcgttcaactggcggaagacctcaagaaagttagagaaattcaagaaaaacttgatgctttcattgaagctcttcatcaggagaaataatctagagcctcgactgtgccttctagttgccagccatctgttgtttgcccctcccccgtgccttccttgaccctggaaggtgccactcccactgtcctttcctaataaaatgaggaaattgcatcgcattgtctgagtaggtgtcattctattctggggggtggggtggggcaggacagcaagggggaggattgggaagagaatagcaggcatgctggggatcctttttccctaaccctaaccctaaccctaaatttttccctaaccctaaccctaaccctaaatttttccctaaccctaaccctaaccctaaatttttgcggccgca

SEQ ID NO: 237 - DNA, 4215 bp, synthetic construct
  source 1..4215: mol_type = other DNA
cagatctatgtgagcaaacagcagcatgctggggaaaaatttagggttagggttagggttagggaaaaatttagggttagggttagggttagggaaaaatttagggttagggttagggttagggaaaaacgcgtggtacccgttacataacttacggtaaatggcccgcctggctgaccgcccaacgacccccgcccattgacgtcaatagtaacgccaatagggactttccattgacgtcaatgggtggagtatttacggtaaactgcccacttggcagtacatcaagtgtatcatatgccaagtacgccccctattgacgtcaatgacggtaaatggcccgcctggcattgtgcccagtacatgaccttatgggactttcctacttggcagtacatctacgtattagtcatcgctattaccatggtcgaggtgagccccacgttctgcttcactctccccatctcccccccctccccacccccaattttgtatttatttattttttaattattttgtgcagcgatgggggcggggggggggggggggcgcgcgccaggcggggcggggcggggcgaggggcggggcggggcgaggcggagaggtgcggcggcagccaatcagagcggcgcgctccgaaagtttccttttatggcgaggcggcggcggcggcggccctataaaaagcgaagcgcgcggcgggcgggagtcgctgcgacgctgccttcgccccgtgccccgctccgccgccgcctcgcgccgcccgccccggctctgactgaccgcgttactcccacaggtgagcgggcgggacggcccttctcctccgggctgtaattagctgagctttaagggaaggttggttggtggggtattaatctttaattacctggagcacctgcctgaaatcactttttttcaggttggaccggtccaccatgtggcgactacgtcgggccgctgtggcctgtgaggtctgccagtctttagtgaaacacagctctggaataaaaggaagtttaccactacaaaaactacatctggtttcacgaagcatttatcattcacatcatcctaccttaaagcttcaacgaccccaattaaggacatcctttcagcagttctcttctctgacaaaccttcctttacgtaaactgaaattctctccaattaaatatggctaccagcctcgcaggaatttttggccagcaagattagctacgagactcttaaaacttcgctatctcatactaggatcggctgttgggggtggctacacagccaaaaagacttttgatcagtggaaagatatgataccggaccttagtgaatataaatggattgtgcctgacattgtgtgggaaattgatgagtatatcgattttgagaaaattagaaaagcccttcctagttcagaagaccttgtaaagttagcaccagactttgacaagattgttgaaagccttagcttattgaaggacttttttacctcaggttctccggaagaaacggcgtttagagcaacagatcgtggatctgaaagtgacaagcattttagaaaggtgtcagacaaagagaaaattgaccaacttcaggaagaacttctgcacactcagttgaagtatcagagaatcttggaacgattagaaaaggagaacaaagaattgagaaaattagtattgcagaaagatgacaaaggcattcatcatagaaagcttaagaaatctttgattgacatgtattctgaagttcttgatgttctctctgattatgatgccagttataatacgcaagatcatctgccacgggttgttgtggttggagatcagagtgctggaaagactagtgtgttggaaatgattgcccaagctcgaatattcccaagaggatctggggagatgatgacacgttctccagttaaggtgactctgagtgaaggtcctcaccatgtggccctatttaaagatagttctcgggagtttgatcttaccaaagaagaggatcttgcagcattaagacatgaaatagaacttcgaatgaggaaaaatgtgaaagaaggctgtaccgttagccctgagaccatatccttaaatgtaaaaggccctggactacagaggatggtgcttgttgacttaccaggtgtgattaatactgtgacatcaggcatggctcctgacacaaaggaaactattttcagtatcagcaaagcttacatgcagaatcctaatgccatcatactgtgtattcaagatggatctgtggatgctgaacgcagtattgttacagacttggtcagtcaaatggaccctcatggaaggagaaccatattcgttttgaccaaagtagacctggcagagaaaaatgtagccagtccaagcaggattcagcagataattgaaggaaagctcttcccaatgaaagctttaggttattttgctgttgtaacaggaaaagggaacagctctgaaagcattgaagctataagagaatatgaagaagagttttttcagaattcaaagctcctaaagacaagcatgctaaaggcacaccaagtgactacaagaaatttaagccttgcagtatcagactgcttttggaaaatggtacgagagtctgttgaacaacaggctgatagtttcaaagcaacacgttttaaccttgaaactgaatggaagaataactatcctcgcctgcgggaacttgaccggaatgaactatttgaaaaagctaaaaatgaaatccttgatgaagttatcagtctgagccaggttacaccaaaacattgggaggaaatccttcaacaatctttgtgggaaagagtatcaactcatgtgattgaaaacatctaccttccagctgcgcagaccatgaattcaggaacttttaacaccacagtggatatcaagcttaaacagtggactgataaacaacttcctaataaagcagtagaggttgcttgggagaccctacaagaagaattttcccgctttatgacagaaccgaaagggaaagagcatgatgacatatttgataaacttaaagaggctgttaaggaagaaagtattaaacgacacaagtggaatgactttgcggaggacagcttgagggttattcaacacaatgctttggaagaccgatccatatctgataaacagcaatgggatgcagctatttattttatggaagaggctctgcaggctcgtctcaaggatactgaaaatgcaattgaaaacatggtgggtccagactggaaaaagaggtggttatactggaagaatcggacccaagaacagtgtgttcacaatgaaaccaagaatgaattggagaagatgttgaaatgtaatgaggagcacccagcttatcttgcaagtgatgaaataaccacagtccggaagaaccttgaatcccgaggagtagaagtagatccaagcttgattaaggatacttggcatcaagtttatagaagacattttttaaaaacagctctaaaccattgtaacctttgtcgaagaggtttttattactaccaaaggcattttgtagattctgagttggaatgcaatgatgtggtcttgttttggcgtatacagcgcatgcttgctatcaccgcaaatactttaaggcaacaacttacaaatactgaagttaggcgattagagaaaaatgttaaagaggtattggaagattttgctgaagatggtgagaagaagattaaattgcttactggtaagcgcgttcaactggcggaagacctcaagaaagttagagaaattcaagaaaaacttgatgctttcattgaagctcttcatcaggagaaagactacaaagaccatgacggtgattataaagatcatgacatcgattacaaggatgacgatgacaagtaatctagagcctcgactgtgccttctagttgccagccatctgttgtttgcccctcccccgtgccttccttgaccctggaaggtgccactcccactgtcctttcctaataaaatgaggaaattgcatcgcattgtctgagtaggtgtcattctattctggggggtggggtggggcaggacagcaagggggaggattgggaagagaatagcaggcatgctggggatcctttttccctaaccctaaccctaaccctaaatttttccctaaccctaaccctaaccctaaatttttccctaaccctaaccctaaccctaaatttttgcggccgca

SEQ ID NO: 238 - DNA, 4182 bp, synthetic construct
  source 1..4182: mol_type = other DNA
cagatctatgtgagcaaacagcagcatgctggggaaaaatttagggttagggttagggttagggaaaaatttagggttagggttagggttagggaaaaatttagggttagggttagggttagggaaaaacgcgtggtacccgttacataacttacggtaaatggcccgcctggctgaccgcccaacgacccccgcccattgacgtcaatagtaacgccaatagggactttccattgacgtcaatgggtggagtatttacggtaaactgcccacttggcagtacatcaagtgtatcatatgccaagtacgccccctattgacgtcaatgacggtaaatggcccgcctggcattgtgcccagtacatgaccttatgggactttcctacttggcagtacatctacgtattagtcatcgctattaccatggtcgaggtgagccccacgttctgcttcactctccccatctcccccccctccccacccccaattttgtatttatttattttttaattattttgtgcagcgatgggggcggggggggggggggggcgcgcgccaggcggggcggggcggggcgaggggcggggcggggcgaggcggagaggtgcggcggcagccaatcagagcggcgcgctccgaaagtttccttttatggcgaggcggcggcggcggcggccctataaaaagcgaagcgcgcggcgggcgggagtcgctgcgacgctgccttcgccccgtgccccgctccgccgccgcctcgcgccgcccgccccggctctgactgaccgcgttactcccacaggtgagcgggcgggacggcccttctcctccgggctgtaattagctgagctttaagggaaggttggttggtggggtattaatctttaattacctggagcacctgcctgaaatcactttttttcaggttggaccggtccaccatgtggcgactacgtcgggccgctgtggcctgtgaggtctgccagtctttagtgaaacacagctctggaataaaaggaagtttaccactacaaaaactacatctggtttcacgaagcatttatcattcacatcatcctaccttaaagcttcaacgaccccaattaaggacatcctttcagcagttctcttctctgacaaaccttcctttacgtaaactgaaattctctccaattaaatatggctaccagcctcgcaggaatttttggccagcaagattagctacgagactcttaaaacttcgctatctcatactaggatcggctgttgggggtggctacacagccaaaaagacttttgatcagtggaaagatatgataccggaccttagtgaatataaatggattgtgcctgacattgtgtgggaaattgatgagtatatcgattttgagaaaattagaaaagcccttcctagttcagaagaccttgtaaagttagcaccagactttgacaagattgttgaaagccttagcttattgaaggacttttttacctcaggttctccggaagaaagtgacaagcattttagaaaggtgtcagacaaagagaaaattgaccaacttcaggaagaacttctgcacactcagttgaagtatcagagaatcttggaacgattagaaaaggagaacaaagaattgagaaaattagtattgcagaaagatgacaaaggcattcatcatagaaagcttaagaaatctttgattgacatgtattctgaagttcttgatgttctctctgattatgatgccagttataatacgcaagatcatctgccacgggttgttgtggttggagatcagagtgctggaaagactagtgtgttggaaatgattgcccaagctcgaatattcccaagaggatctggggagatgatgacacgttctccagttaaggtgactctgagtgaaggtcctcaccatgtggccctatttaaagatagttctcgggagtttgatcttaccaaagaagaggatcttgcagcattaagacatgaaatagaacttcgaatgaggaaaaatgtgaaagaaggctgtaccgttagccctgagaccatatccttaaatgtaaaaggccctggactacagaggatggtgcttgttgacttaccaggtgtgattaatactgtgacatcaggcatggctcctgacacaaaggaaactattttcagtatcagcaaagcttacatgcagaatcctaatgccatcatactgtgtattcaagatggatctgtggatgctgaacgcagtattgttacagacttggtcagtcaaatggaccctcatggaaggagaaccatattcgttttgaccaaagtagacctggcagagaaaaatgtagccagtccaagcaggattcagcagataattgaaggaaagctcttcccaatgaaagctttaggttattttgctgttgtaacaggaaaagggaacagctctgaaagcattgaagctataagagaatatgaagaagagttttttcagaattcaaagctcctaaagacaagcatgctaaaggcacaccaagtgactacaagaaatttaagccttgcagtatcagactgcttttggaaaatggtacgagagtctgttgaacaacaggctgatagtttcaaagcaacacgttttaaccttgaaactgaatggaagaataactatcctcgcctgcgggaacttgaccggaatgaactatttgaaaaagctaaaaatgaaatccttgatgaagttatcagtctgagccaggttacaccaaaacattgggaggaaatccttcaacaatctttgtgggaaagagtatcaactcatgtgattgaaaacatctaccttccagctgcgcagaccatgaattcaggaacttttaacaccacagtggatatcaagcttaaacagtggactgataaacaacttcctaataaagcagtagaggttgcttgggagaccctacaagaagaattttcccgctttatgacagaaccgaaagggaaagagcatgatgacatatttgataaacttaaagaggctgttaaggaagaaagtattaaacgacacaagtggaatgactttgcggaggacagcttgagggttattcaacacaatgctttggaagaccgatccatatctgataaacagcaatgggatgcagctatttattttatggaagaggctctgcaggctcgtctcaaggatactgaaaatgcaattgaaaacatggtgggtccagactggaaaaagaggtggttatactggaagaatcggacccaagaacagtgtgttcacaatgaaaccaagaatgaattggagaagatgttgaaatgtaatgaggagcacccagcttatcttgcaagtgatgaaataaccacagtccggaagaaccttgaatcccgaggagtagaagtagatccaagcttgattaaggatacttggcatcaagtttatagaagacattttttaaaaacagctctaaaccattgtaacctttgtcgaagaggtttttattactaccaaaggcattttgtagattctgagttggaatgcaatgatgtggtcttgttttggcgtatacagcgcatgcttgctatcaccgcaaatactttaaggcaacaacttacaaatactgaagttaggcgattagagaaaaatgttaaagaggtattggaagattttgctgaagatggtgagaagaagattaaattgcttactggtaagcgcgttcaactggcggaagacctcaagaaagttagagaaattcaagaaaaacttgatgctttcattgaagctcttcatcaggagaaagactacaaagaccatgacggtgattataaagatcatgacatcgattacaaggatgacgatgacaagtaatctagagcctcgactgtgccttctagttgccagccatctgttgtttgcccctcccccgtgccttccttgaccctggaaggtgccactcccactgtcctttcctaataaaatgaggaaattgcatcgcattgtctgagtaggtgtcattctattctggggggtggggtggggcaggacagcaagggggaggattgggaagagaatagcaggcatgctggggatcctttttccctaaccctaaccctaaccctaaatttttccctaaccctaaccctaaccctaaatttttccctaaccctaaccctaaccctaaatttttgcggccgca

SEQ ID NO: 239 - DNA, 4326 bp, synthetic construct
  source 1..4326: mol_type = other DNA
cagatctatgtgagcaaacagcagcatgctggggaaaaatttagggttagggttagggttagggaaaaatttagggttagggttagggttagggaaaaatttagggttagggttagggttagggaaaaacgcgtggtacccgttacataacttacggtaaatggcccgcctggctgaccgcccaacgacccccgcccattgacgtcaatagtaacgccaatagggactttccattgacgtcaatgggtggagtatttacggtaaactgcccacttggcagtacatcaagtgtatcatatgccaagtacgccccctattgacgtcaatgacggtaaatggcccgcctggcattgtgcccagtacatgaccttatgggactttcctacttggcagtacatctacgtattagtcatcgctattaccatggtcgaggtgagccccacgttctgcttcactctccccatctcccccccctccccacccccaattttgtatttatttattttttaattattttgtgcagcgatgggggcggggggggggggggggcgcgcgccaggcggggcggggcggggcgaggggcggggcggggcgaggcggagaggtgcggcggcagccaatcagagcggcgcgctccgaaagtttccttttatggcgaggcggcggcggcggcggccctataaaaagcgaagcgcgcggcgggcgggagtcgctgcgacgctgccttcgccccgtgccccgctccgccgccgcctcgcgccgcccgccccggctctgactgaccgcgttactcccacaggtgagcgggcgggacggcccttctcctccgggctgtaattagctgagctttaagggaaggttggttggtggggtattaatctttaattacctggagcacctgcctgaaatcactttttttcaggttggaccggtccaccatgtggcgactacgtcgggccgctgtggcctgtgaggtctgccagtctttagtgaaacacagctctggaataaaaggaagtttaccactacaaaaactacatctggtttcacgaagcatttatcattcacatcatcctaccttaaagcttcaacgaccccaattaaggacatcctttcagcagttctcttctctgacaaaccttcctttacgtaaactgaaattctctccaattaaatatggctaccagcctcgcaggaatttttggccagcaagattagctacgagactcttaaaacttcgctatctcatactaggatcggctgttgggggtggctacacagccaaaaagacttttgatcagtggaaagatatgataccggaccttagtgaatataaatggattgtgcctgacattgtgtgggaaattgatgagtatatcgattttgagaaaattagaaaagcccttcctagttcagaagaccttgtaaagttagcaccagactttgacaagattgttgaaagccttagcttattgaaggacttttttacctcaggttctccggaagaaacggcgtttagagcaacagatcgtggatctgaaagtgacaagcattttagaaagggtctgcttggtgagctcattctcttacaacaacaaattcaagagcatgaagaggaagcgcgcagagccgctggccaatatagcacgagctatgcccaacagaagcgcaaggtgtcagacaaagagaaaattgaccaacttcaggaagaacttctgcacactcagttgaagtatcagagaatcttggaacgattagaaaaggagaacaaagaattgagaaaattagtattgcagaaagatgacaaaggcattcatcatagaaagcttaagaaatctttgattgacatgtattctgaagttcttgatgttctctctgattatgatgccagttataatacgcaagatcatctgccacgggttgttgtggttggagatcagagtgctggaaagactagtgtgttggaaatgattgcccaagctcgaatattcccaagaggatctggggagatgatgacacgttctccagttaaggtgactctgagtgaaggtcctcaccatgtggccctatttaaagatagttctcgggagtttgatcttaccaaagaagaggatcttgcagcattaagacatgaaatagaacttcgaatgaggaaaaatgtgaaagaaggctgtaccgttagccctgagaccatatccttaaatgtaaaaggccctggactacagaggatggtgcttgttgacttaccaggtgtgattaatactgtgacatcaggcatggctcctgacacaaaggaaactattttcagtatcagcaaagcttacatgcagaatcctaatgccatcatactgtgtattcaagatggatctgtggatgctgaacgcagtattgttacagacttggtcagtcaaatggaccctcatggaaggagaaccatattcgttttgaccaaagtagacctggcagagaaaaatgtagccagtccaagcaggattcagcagataattgaaggaaagctcttcccaatgaaagctttaggttattttgctgttgtaacaggaaaagggaacagctctgaaagcattgaagctataagagaatatgaagaagagttttttcagaattcaaagctcctaaagacaagcatgctaaaggcacaccaagtgactacaagaaatttaagccttgcagtatcagactgcttttggaaaatggtacgagagtctgttgaacaacaggctgatagtttcaaagcaacacgttttaaccttgaaactgaatggaagaataactatcctcgcctgcgggaacttgaccggaatgaactatttgaaaaagctaaaaatgaaatccttgatgaagttatcagtctgagccaggttacaccaaaacattgggaggaaatccttcaacaatctttgtgggaaagagtatcaactcatgtgattgaaaacatctaccttccagctgcgcagaccatgaattcaggaacttttaacaccacagtggatatcaagcttaaacagtggactgataaacaacttcctaataaagcagtagaggttgcttgggagaccctacaagaagaattttcccgctttatgacagaaccgaaagggaaagagcatgatgacatatttgataaacttaaagaggctgttaaggaagaaagtattaaacgacacaagtggaatgactttgcggaggacagcttgagggttattcaacacaatgctttggaagaccgatccatatctgataaacagcaatgggatgcagctatttattttatggaagaggctctgcaggctcgtctcaaggatactgaaaatgcaattgaaaacatggtgggtccagactggaaaaagaggtggttatactggaagaatcggacccaagaacagtgtgttcacaatgaaaccaagaatgaattggagaagatgttgaaatgtaatgaggagcacccagcttatcttgcaagtgatgaaataaccacagtccggaagaaccttgaatcccgaggagtagaagtagatccaagcttgattaaggatacttggcatcaagtttatagaagacattttttaaaaacagctctaaaccattgtaacctttgtcgaagaggtttttattactaccaaaggcattttgtagattctgagttggaatgcaatgatgtggtcttgttttggcgtatacagcgcatgcttgctatcaccgcaaatactttaaggcaacaacttacaaatactgaagttaggcgattagagaaaaatgttaaagaggtattggaagattttgctgaagatggtgagaagaagattaaattgcttactggtaagcgcgttcaactggcggaagacctcaagaaagttagagaaattcaagaaaaacttgatgctttcattgaagctcttcatcaggagaaagactacaaagaccatgacggtgattataaagatcatgacatcgattacaaggatgacgatgacaagtaatctagagcctcgactgtgccttctagttgccagccatctgttgtttgcccctcccccgtgccttccttgaccctggaaggtgccactcccactgtcctttcctaataaaatgaggaaattgcatcgcattgtctgagtaggtgtcattctattctggggggtggggtggggcaggacagcaagggggaggattgggaagagaatagcaggcatgctggggatcctttttccctaaccctaaccctaaccctaaatttttccctaaccctaaccctaaccctaaatttttccctaaccctaaccctaaccctaaatttttgcggccgca

SEQ ID NO: 240 - DNA, 1703 bp, synthetic construct
  source 1..1703: mol_type = other DNA
tggaggcagaggagaaggcccaggcttcccagcagggctaaggatatgcaaggagtgcattcatccggaggtgttggcagcatcccagccccaccccattctcatcgtaaatcaggctcacttccattggctgcatacggtggagtgatgtgaccatatgtcacttgagcattacacaaatcctaatgagctaaaaatatgtttgttttagctaattgacctctttggccttcataaagcgggccccagaagcctggtggttgtttgtccttctcaggggaaaagtgaggcggccccttggaggaaggggccgggcagaatgatctaatcggattccaagcagctcaggggattgtctttttctagcaccttcttgccactcctaagcgtcctccgtgaccccggctgggatttagcctggtgctgtgtcagccccgggctcccaggggcttcccagtggtccccaggaaccctcgacagggccagggcgtctctctcgtccagcaagggcagggacgggccacaggccaagggcaccggagccccggctctgactgaccgcgttactcccacaggtgagcgggcggtttaagggaaggttggttggtggggtattaatctttaattacctggagcacctgcctgaaatcactttttttcaggttggaccggtccaccatgagccgcaagatagaaggctttttgttattacttctctttggctatgaagccacattgggattatcgtctaccgaggatgaaggcgaggacccctggtatcaaaaagcatgcgatgaaggcgaggacccctggtatcaaaaagcatgcaagtgcgattgccaaggaggacccaatgctctgtggtctgcaggtgccacctccttggactgtataccagaatgcccatatcacaagcctctgggtttcgagtcaggggaggtcacaccggaccagatcacctgctctaacccggagcagtatgtgggctggtattcttcgtggactgcaaacaaggcccggctcaacagtcaaggctttgggtgtgcctggctctccaagttccaggacagtagccagtggttacagatagatctgaaggagatcaaagtgatttcagggatcctcacccaggggcgctgtgacatcgatgagtggatgaccaagtacagcgtgcagtacaggaccgatgagcgcctgaactggatttactacaaggaccagactggaaacaaccgggtcttctatggcaactcggaccgcacctccacggttcagaacctgctgcggccccccatcatctcccgcttcatccgcctcatcccgctgggctggcacgtccgcattgccatccggatggagctgctggagtgcgtcagcaagtgtgcctgaagcttctagagcctcgactgtgccttctagttgccagccatctgttgtttgcccctcccccgtgccttccttgaccctggaaggtgccactcccactgtcctttcctaataaaatgaggaaattgcatcgcattgtctgagtaggtgtcattctattctggggggtggggtggggcaggacagcaagggggaggattgggaagagaatagcaggcatgctggggaaaaatttagggttagggttagggttagggaaaaatttagggttagggttagggttagggaaaaatttagggttagggttagggttaggg

SEQ ID NO: 241 - DNA, 1787 bp, synthetic construct
  source 1..1787: mol_type = other DNA
cgttacataacttacggtaaatggcccgcctggctgaccgcccaacgacccccgcccattgacgtcaatagtaacgccaatagggactttccattgacgtcaatgggtggagtatttacggtaaactgcccacttggcagtacatcaagtgtatcatatgccaagtacgccccctattgacgtcaatgacggtaaatggcccgcctggcattgtgcccagtacatgaccttatgggactttcctacttggcagtacatctacgtattagtcatcgctattaccatggtcgaggtgagccccacgttctgcttcactctccccatctcccccccctccccacccccaattttgtatttatttattttttaattattttgtgcagcgatgggggcggggggggggggggggcgcgcgccaggcggggcggggcggggcgaggggcggggcggggcgaggcggagaggtgcggcggcagccaatcagagcggcgcgctccgaaagtttccttttatggcgaggcggcggcggcggcggccctataaaaagcgaagcgcgcggcgggcgggagtcgctgcgacgctgccttcgccccgtgccccgctccgccgccgcctcgcgccgcccgccccggctctgactgaccgcgttactcccacaggtgagcgggcgggacggcccttctcctccgggctgtaattagctgagctttaagggaaggttggttggtggggtattaatctttaattacctggagcacctgcctgaaatcactttttttcaggttggaccggtccaccatgagccgcaagatagaaggctttttgttattacttctctttggctatgaagccacattgggattatcgtctaccgaggatgaaggcgaggacccctggtatcaaaaagcatgcaagtgcgattgccaaggaggacccaatgctctgtggtctgcaggtgccacctccttggactgtataccagaatgcccatatcacaagcctctgggtttcgagtcaggggaggtcacaccggaccagatcacctgctctaacccggagcagtatgtgggctggtattcttcgtggactgcaaacaaggcccggctcaacagtcaaggctttgggtgtgcctggctctccaagttccaggacagtagccagtggttacagatagatctgaaggagatcaaagtgatttcagggatcctcacccaggggcgctgtgacatcgatgagtggatgaccaagtacagcgtgcagtacaggaccgatgagcgcctgaactggatttactacaaggaccagactggaaacaaccgggtcttctatggcaactcggaccgcacctccacggttcagaacctgctgcggccccccatcatctcccgcttcatccgcctcatcccgctgggctggcacgtccgcattgccatccggatggagctgctggagtgcgtcagcaagtgtgcctgaagcttctagagcctcgactgtgccttctagttgccagccatctgttgtttgcccctcccccgtgccttccttgaccctggaaggtgccactcccactgtcctttcctaataaaatgaggaaattgcatcgcattgtctgagtaggtgtcattctattctggggggtggggtggggcaggacagcaagggggaggattgggaagagaatagcaggcatgctggggaaaaatttagggttagggttagggttagggaaaaatttagggttagggttagggttagggaaaaatttagggttagggttagggttaggg

SEQ ID NO: 242 - DNA, 1667 bp, synthetic construct
  source 1..1667: mol_type = other DNA
tggaggcagaggagaaggcccaggcttcccagcagggctaaggatatgcaaggagtgcattcatccggaggtgttggcagcatcccagccccaccccattctcatcgtaaatcaggctcacttccattggctgcatacggtggagtgatgtgaccatatgtcacttgagcattacacaaatcctaatgagctaaaaatatgtttgttttagctaattgacctctttggccttcataaagcgggccccagaagcctggtggttgtttgtccttctcaggggaaaagtgaggcggccccttggaggaaggggccgggcagaatgatctaatcggattccaagcagctcaggggattgtctttttctagcaccttcttgccactcctaagcgtcctccgtgaccccggctgggatttagcctggtgctgtgtcagccccgggctcccaggggcttcccagtggtccccaggaaccctcgacagggccagggcgtctctctcgtccagcaagggcagggacgggccacaggccaagggcaccggagccccggctctgactgaccgcgttactcccacaggtgagcgggcggtttaagggaaggttggttggtggggtattaatctttaattacctggagcacctgcctgaaatcactttttttcaggttggaccggtccaccatgagccgcaagatagaaggctttttgttattacttctctttggctatgaagccacattgggattatcgtctaccgaggatgaaggcgaggacccctggtatcaaaaagcatgcaagtgcgattgccaaggaggacccaatgctctgtggtctgcaggtgccacctccttggactgtataccagaatgcccatatcacaagcctctgggtttcgagtcaggggaggtcacaccggaccagatcacctgctctaacccggagcagtatgtgggctggtattcttcgtggactgcaaacaaggcccggctcaacagtcaaggctttgggtgtgcctggctctccaagttccaggacagtagccagtggttacagatagatctgaaggagatcaaagtgatttcagggatcctcacccaggggcgctgtgacatcgatgagtggatgaccaagtacagcgtgcagtacaggaccgatgagcgcctgaactggatttactacaaggaccagactggaaacaaccgggtcttctatggcaactcggaccgcacctccacggttcagaacctgctgcggccccccatcatctcccgcttcatccgcctcatcccgctgggctggcacgtccgcattgccatccggatggagctgctggagtgcgtcagcaagtgtgcctgaagcttctagagcctcgactgtgccttctagttgccagccatctgttgtttgcccctcccccgtgccttccttgaccctggaaggtgccactcccactgtcctttcctaataaaatgaggaaattgcatcgcattgtctgagtaggtgtcattctattctggggggtggggtggggcaggacagcaagggggaggattgggaagagaatagcaggcatgctggggaaaaatttagggttagggttagggttagggaaaaatttagggttagggttagggttagggaaaaatttagggttagggttagggttaggg

SEQ ID NO: 243 - DNA, 1704 bp, synthetic construct
  source 1..1704: mol_type = other DNA
tggaggcagaggagaaggcccaggcttcccagcagggctaaggatatgcaaggagtgcattcatccggaggtgttggcagcatcccagccccaccccattctcatcgtaaatcaggctcacttccattggctgcatacggtggagtgatgtgaccatatgtcacttgagcattacacaaatcctaatgagctaaaaatatgtttgttttagctaattgacctctttggccttcataaagcctgcaggcgtaccagttaggggaccttctcctcccttttcctggatcctgagtacctctcctccctgacctcaggcttcctcctagtgtcaccttggcccctcttagaagccaattaggccctcagtttctgcagcggggattaatatgattatgaacacccccaatctcccagatgctgattcagccaggagcttaggagggggaggtcactttataagggtctgggggggtcagaacccagagtcatccagctggagccctgagtggctgagctcaggccttcgcagcattcttgggtgggagcagccacgggtcagccacaagggccactccggagccccggctctgactgaccgcgttactcccacaggtgagcgggcggtttaagggaaggttggttggtggggtattaatctttaattacctggagcacctgcctgaaatcactttttttcaggttggaccggtccaccatgagccgcaagatagaaggctttttgttattacttctctttggctatgaagccacattgggattatcgtctaccgaggatgaaggcgaggacccctggtatcaaaaagcatgcaagtgcgattgccaaggaggacccaatgctctgtggtctgcaggtgccacctccttggactgtataccagaatgcccatatcacaagcctctgggtttcgagtcaggggaggtcacaccggaccagatcacctgctctaacccggagcagtatgtgggctggtattcttcgtggactgcaaacaaggcccggctcaacagtcaaggctttgggtgtgcctggctctccaagttccaggacagtagccagtggttacagatagatctgaaggagatcaaagtgatttcagggatcctcacccaggggcgctgtgacatcgatgagtggatgaccaagtacagcgtgcagtacaggaccgatgagcgcctgaactggatttactacaaggaccagactggaaacaaccgggtcttctatggcaactcggaccgcacctccacggttcagaacctgctgcggccccccatcatctcccgcttcatccgcctcatcccgctgggctggcacgtccgcattgccatccggatggagctgctggagtgcgtcagcaagtgtgcctgaagcttctagagcctcgactgtgccttctagttgccagccatctgttgtttgcccctcccccgtgccttccttgaccctggaaggtgccactcccactgtcctttcctaataaaatgaggaaattgcatcgcattgtctgagtaggtgtcattctattctggggggtggggtggggcaggacagcaagggggaggattgggaagagaatagcaggcatgctggggaaaaatttagggttagggttagggttagggaaaaatttagggttagggttagggttagggaaaaatttagggttagggttagggttaggg

SEQ ID NO: 244 - DNA, 1515 bp, synthetic construct
  source 1..1515: mol_type = other DNA
tggaggcagaggagaaggcccaggcttcccagcagggctaaggatatgcaaggagtgcattcatccggaggtgttggcagcatcccagccccaccccattctcatcgtaaatcaggctcacttccattggctgcatacggtggagtgatgtgaccatatgtcacttgagcattacacaaatcctaatgagctaaaaatatgtttgttttagctaattgacctctttggccttcataaagcctgcaggcccatttgtaggagtgagtcagctgacccgcccccggggttcctaatctcactaagaaagactttgctgatgacagggtttcctgggagtccatgcgtgcctggagcagcagcgtctccagggacaggcagccaccaccggagccccggctctgactgaccgcgttactcccacaggtgagcgggcggtttaagggaaggttggttggtggggtattaatctttaattacctggagcacctgcctgaaatcactttttttcaggttggaccggtccaccatgagccgcaagatagaaggctttttgttattacttctctttggctatgaagccacattgggattatcgtctaccgaggatgaaggcgaggacccctggtatcaaaaagcatgcaagtgcgattgccaaggaggacccaatgctctgtggtctgcaggtgccacctccttggactgtataccagaatgcccatatcacaagcctctgggtttcgagtcaggggaggtcacaccggaccagatcacctgctctaacccggagcagtatgtgggctggtattcttcgtggactgcaaacaaggcccggctcaacagtcaaggctttgggtgtgcctggctctccaagttccaggacagtagccagtggttacagatagatctgaaggagatcaaagtgatttcagggatcctcacccaggggcgctgtgacatcgatgagtggatgaccaagtacagcgtgcagtacaggaccgatgagcgcctgaactggatttactacaaggaccagactggaaacaaccgggtcttctatggcaactcggaccgcacctccacggttcagaacctgctgcggccccccatcatctcccgcttcatccgcctcatcccgctgggctggcacgtccgcattgccatccggatggagctgctggagtgcgtcagcaagtgtgcctgaagcttctagagcctcgactgtgccttctagttgccagccatctgttgtttgcccctcccccgtgccttccttgaccctggaaggtgccactcccactgtcctttcctaataaaatgaggaaattgcatcgcattgtctgagtaggtgtcattctattctggggggtggggtggggcaggacagcaagggggaggattgggaagagaatagcaggcatgctggggaaaaatttagggttagggttagggttagggaaaaatttagggttagggttagggttagggaaaaatttagggttagggttagggttaggg

SEQ ID NO: 245 - DNA, 2186 bp, synthetic construct
  source 1..2186: mol_type = other DNA
cgttacataacttacggtaaatggcccgcctggctgaccgcccaacgacccccgcccattgacgtcaatagtaacgccaatagggactttccattgacgtcaatgggtggagtatttacggtaaactgcccacttggcagtacatcaagtgtatcatatgccaagtacgccccctattgacgtcaatgacggtaaatggcccgcctggcattgtgcccagtacatgaccttatgggactttcctacttggcagtacatctacgtattagtcatcgctattaccatggtcgaggtgagccccacgttctgcttcactctccccatctcccccccctccccacccccaattttgtatttatttattttttaattattttgtgcagcgatgggggcggggggggggggggggcgcgcgccaggcggggcggggcggggcgaggggcggggcggggcgaggcggagaggtgcggcggcagccaatcagagcggcgcgctccgaaagtttccttttatggcgaggcggcggcggcggcggccctataaaaagcgaagcgcgcggcgggcgggagtcgctgcgacgctgccttcgccccgtgccccgctccgccgccgcctcgcgccgcccgccccggctctgactgaccgcgttactcccacaggtgagcgggcgggacggcccttctcctccgggctgtaattagctgagctttaagggaaggttggttggtggggtattaatctttaattacctggagcacctgcctgaaatcactttttttcaggttggaccggtccaccatgagccgcaagatagaaggctttttgttattacttctctttggctatgaagccacattgggattatcgtctaccgaggatgaaggcgaggacccctggtatcaaaaagcatgcaagtgcgattgccaaggaggacccaatgctctgtggtctgcaggtgccacctccttggactgtataccagaatgcccatatcacaagcctctgggtttcgagtcaggggaggtcacaccggaccagatcacctgctctaacccggagcagtatgtgggctggtattcttcgtggactgcaaacaaggcccggctcaacagtcaaggctttgggtgtgcctggctctccaagttccaggacagtagccagtggttacagatagatctgaaggagatcaaagtgatttcagggatcctcacccaggggcgctgtgacatcgatgagtggatgaccaagtacagcgtgcagtacaggaccgatgagcgcctgaactggatttactacaaggaccagactggaaacaaccgggtcttctatggcaactcggaccgcacctccacggttcagaacctgctgcggccccccatcatctcccgcttcatccgcctcatcccgctgggctggcacgtccgcattgccatccggatggagctgctggagtgcgtcagcaagtgtgcctgaagcttctagagcctcgactgtgccttctagttgccagccatctgttgtttgcccctcccccgtgccttccttgaccctggaaggtgccactcccactgtcctttcctaataaaatgaggaaattgcatcgcattgtctgagtaggtgtcattctattctggggggtggggtggggcaggacagcaagggggaggattgggaagagaatagcagaaattatctctaaggcatgtgaactggctgtcttggttttcatctgtacttcatctgctacctctgtgacctgaaacatatttataattccattaagctgtgcatatgatagatttatcatatgtattttccttaaaggatttttgtaagaactaattgaattgatacctgtaaagtctttatcacactacccaataaataataaatctctttgttcagctctctgtttctataaatatgtaccagttttattgtttttagtggtagtgattttattctctttctatatatatacacacacatgtgtgcattcataaatatatacaatttttatgaataaaaaattattagcaatcaatattgaaaaccactgatttttgtttatgtgagcaaacagcagcatgctggggaaaaatttagggttagggttagggttagggaaaaatttagggttagggttagggttagggaaaaatttagggttagggttagggttaggg

SEQ ID NO: 246 - DNA, 2066 bp, synthetic construct
  source 1..2066: mol_type = other DNA
tggaggcagaggagaaggcccaggcttcccagcagggctaaggatatgcaaggagtgcattcatccggaggtgttggcagcatcccagccccaccccattctcatcgtaaatcaggctcacttccattggctgcatacggtggagtgatgtgaccatatgtcacttgagcattacacaaatcctaatgagctaaaaatatgtttgttttagctaattgacctctttggccttcataaagcgggccccagaagcctggtggttgtttgtccttctcaggggaaaagtgaggcggccccttggaggaaggggccgggcagaatgatctaatcggattccaagcagctcaggggattgtctttttctagcaccttcttgccactcctaagcgtcctccgtgaccccggctgggatttagcctggtgctgtgtcagccccgggctcccaggggcttcccagtggtccccaggaaccctcgacagggccagggcgtctctctcgtccagcaagggcagggacgggccacaggccaagggcaccggagccccggctctgactgaccgcgttactcccacaggtgagcgggcggtttaagggaaggttggttggtggggtattaatctttaattacctggagcacctgcctgaaatcactttttttcaggttggaccggtccaccatgagccgcaagatagaaggctttttgttattacttctctttggctatgaagccacattgggattatcgtctaccgaggatgaaggcgaggacccctggtatcaaaaagcatgcaagtgcgattgccaaggaggacccaatgctctgtggtctgcaggtgccacctccttggactgtataccagaatgcccatatcacaagcctctgggtttcgagtcaggggaggtcacaccggaccagatcacctgctctaacccggagcagtatgtgggctggtattcttcgtggactgcaaacaaggcccggctcaacagtcaaggctttgggtgtgcctggctctccaagttccaggacagtagccagtggttacagatagatctgaaggagatcaaagtgatttcagggatcctcacccaggggcgctgtgacatcgatgagtggatgaccaagtacagcgtgcagtacaggaccgatgagcgcctgaactggatttactacaaggaccagactggaaacaaccgggtcttctatggcaactcggaccgcacctccacggttcagaacctgctgcggccccccatcatctcccgcttcatccgcctcatcccgctgggctggcacgtccgcattgccatccggatggagctgctggagtgcgtcagcaagtgtgcctgaagcttctagagcctcgactgtgccttctagttgccagccatctgttgtttgcccctcccccgtgccttccttgaccctggaaggtgccactcccactgtcctttcctaataaaatgaggaaattgcatcgcattgtctgagtaggtgtcattctattctggggggtggggtggggcaggacagcaagggggaggattgggaagagaatagcagaaattatctctaaggcatgtgaactggctgtcttggttttcatctgtacttcatctgctacctctgtgacctgaaacatatttataattccattaagctgtgcatatgatagatttatcatatgtattttccttaaaggatttttgtaagaactaattgaattgatacctgtaaagtctttatcacactacccaataaataataaatctctttgttcagctctctgtttctataaatatgtaccagttttattgtttttagtggtagtgattttattctctttctatatatatacacacacatgtgtgcattcataaatatatacaatttttatgaataaaaaattattagcaatcaatattgaaaaccactgatttttgtttatgtgagcaaacagcagcatgctggggaaaaatttagggttagggttagggttagggaaaaatttagggttagggttagggttagggaaaaatttagggttagggttagggttaggg

SEQ ID NO: 247 - DNA, 2103 bp, synthetic construct
  source 1..2103: mol_type = other DNA
tggaggcagaggagaaggcccaggcttcccagcagggctaaggatatgcaaggagtgcattcatccggaggtgttggcagcatcccagccccaccccattctcatcgtaaatcaggctcacttccattggctgcatacggtggagtgatgtgaccatatgtcacttgagcattacacaaatcctaatgagctaaaaatatgtttgttttagctaattgacctctttggccttcataaagcctgcaggcgtaccagttaggggaccttctcctcccttttcctggatcctgagtacctctcctccctgacctcaggcttcctcctagtgtcaccttggcccctcttagaagccaattaggccctcagtttctgcagcggggattaatatgattatgaacacccccaatctcccagatgctgattcagccaggagcttaggagggggaggtcactttataagggtctgggggggtcagaacccagagtcatccagctggagccctgagtggctgagctcaggccttcgcagcattcttgggtgggagcagccacgggtcagccacaagggccactccggagccccggctctgactgaccgcgttactcccacaggtgagcgggcggtttaagggaaggttggttggtggggtattaatctttaattacctggagcacctgcctgaaatcactttttttcaggttggaccggtccaccatgagccgcaagatagaaggctttttgttattacttctctttggctatgaagccacattgggattatcgtctaccgaggatgaaggcgaggacccctggtatcaaaaagcatgcaagtgcgattgccaaggaggacccaatgctctgtggtctgcaggtgccacctccttggactgtataccagaatgcccatatcacaagcctctgggtttcgagtcaggggaggtcacaccggaccagatcacctgctctaacccggagcagtatgtgggctggtattcttcgtggactgcaaacaaggcccggctcaacagtcaaggctttgggtgtgcctggctctccaagttccaggacagtagccagtggttacagatagatctgaaggagatcaaagtgatttcagggatcctcacccaggggcgctgtgacatcgatgagtggatgaccaagtacagcgtgcagtacaggaccgatgagcgcctgaactggatttactacaaggaccagactggaaacaaccgggtcttctatggcaactcggaccgcacctccacggttcagaacctgctgcggccccccatcatctcccgcttcatccgcctcatcccgctgggctggcacgtccgcattgccatccggatggagctgctggagtgcgtcagcaagtgtgcctgaagcttctagagcctcgactgtgccttctagttgccagccatctgttgtttgcccctcccccgtgccttccttgaccctggaaggtgccactcccactgtcctttcctaataaaatgaggaaattgcatcgcattgtctgagtaggtgtcattctattctggggggtggggtggggcaggacagcaagggggaggattgggaagagaatagcagaaattatctctaaggcatgtgaactggctgtcttggttttcatctgtacttcatctgctacctctgtgacctgaaacatatttataattccattaagctgtgcatatgatagatttatcatatgtattttccttaaaggatttttgtaagaactaattgaattgatacctgtaaagtctttatcacactacccaataaataataaatctctttgttcagctctctgtttctataaatatgtaccagttttattgtttttagtggtagtgattttattctctttctatatatatacacacacatgtgtgcattcataaatatatacaatttttatgaataaaaaattattagcaatcaatattgaaaaccactgatttttgtttatgtgagcaaacagcagcatgctggggaaaaatttagggttagggttagggttagggaaaaatttagggttagggttagggttagggaaaaatttagggttagggttagggttaggg

SEQ ID NO: 248 - DNA, 1914 bp, synthetic construct
  source 1..1914: mol_type = other DNA
tggaggcagaggagaaggcccaggcttcccagcagggctaaggatatgcaaggagtgcattcatccggaggtgttggcagcatcccagccccaccccattctcatcgtaaatcaggctcacttccattggctgcatacggtggagtgatgtgaccatatgtcacttgagcattacacaaatcctaatgagctaaaaatatgtttgttttagctaattgacctctttggccttcataaagcctgcaggcccatttgtaggagtgagtcagctgacccgcccccggggttcctaatctcactaagaaagactttgctgatgacagggtttcctgggagtccatgcgtgcctggagcagcagcgtctccagggacaggcagccaccaccggagccccggctctgactgaccgcgttactcccacaggtgagcgggcggtttaagggaaggttggttggtggggtattaatctttaattacctggagcacctgcctgaaatcactttttttcaggttggaccggtccaccatgagccgcaagatagaaggctttttgttattacttctctttggctatgaagccacattgggattatcgtctaccgaggatgaaggcgaggacccctggtatcaaaaagcatgcaagtgcgattgccaaggaggacccaatgctctgtggtctgcaggtgccacctccttggactgtataccagaatgcccatatcacaagcctctgggtttcgagtcaggggaggtcacaccggaccagatcacctgctctaacccggagcagtatgtgggctggtattcttcgtggactgcaaacaaggcccggctcaacagtcaaggctttgggtgtgcctggctctccaagttccaggacagtagccagtggttacagatagatctgaaggagatcaaagtgatttcagggatcctcacccaggggcgctgtgacatcgatgagtggatgaccaagtacagcgtgcagtacaggaccgatgagcgcctgaactggatttactacaaggaccagactggaaacaaccgggtcttctatggcaactcggaccgcacctccacggttcagaacctgctgcggccccccatcatctcccgcttcatccgcctcatcccgctgggctggcacgtccgcattgccatccggatggagctgctggagtgcgtcagcaagtgtgcctgaagcttctagagcctcgactgtgccttctagttgccagccatctgttgtttgcccctcccccgtgccttccttgaccctggaaggtgccactcccactgtcctttcctaataaaatgaggaaattgcatcgcattgtctgagtaggtgtcattctattctggggggtggggtggggcaggacagcaagggggaggattgggaagagaatagcagaaattatctctaaggcatgtgaactggctgtcttggttttcatctgtacttcatctgctacctctgtgacctgaaacatatttataattccattaagctgtgcatatgatagatttatcatatgtattttccttaaaggatttttgtaagaactaattgaattgatacctgtaaagtctttatcacactacccaataaataataaatctctttgttcagctctctgtttctataaatatgtaccagttttattgtttttagtggtagtgattttattctctttctatatatatacacacacatgtgtgcattcataaatatatacaatttttatgaataaaaaattattagcaatcaatattgaaaaccactgatttttgtttatgtgagcaaacagcagcatgctggggaaaaatttagggttagggttagggttagggaaaaatttagggttagggttagggttagggaaaaatttagggttagggttagggttaggg

SEQ ID NO: 249 - DNA, 1817 bp, synthetic construct
  source 1..1817: mol_type = other DNA
cgttacataacttacggtaaatggcccgcctggctgaccgcccaacgacccccgcccattgacgtcaatagtaacgccaatagggactttccattgacgtcaatgggtggagtatttacggtaaactgcccacttggcagtacatcaagtgtatcatatgccaagtacgccccctattgacgtcaatgacggtaaatggcccgcctggcattgtgcccagtacatgaccttatgggactttcctacttggcagtacatctacgtattagtcatcgctattaccatggtcgaggtgagccccacgttctgcttcactctccccatctcccccccctccccacccccaattttgtatttatttattttttaattattttgtgcagcgatgggggcggggggggggggggggcgcgcgccaggcggggcggggcggggcgaggggcggggcggggcgaggcggagaggtgcggcggcagccaatcagagcggcgcgctccgaaagtttccttttatggcgaggcggcggcggcggcggccctataaaaagcgaagcgcgcggcgggcgggagtcgctgcgacgctgccttcgccccgtgccccgctccgccgccgcctcgcgccgcccgccccggctctgactgaccgcgttactcccacaggtgagcgggcgggacggcccttctcctccgggctgtaattagctgagctttaagggaaggttggttggtggggtattaatctttaattacctggagcacctgcctgaaatcactttttttcaggttggaccggtccaccatgagccgcaagatagaaggctttttgttattacttctctttggctatgaagccacattgggattatcggagcagaagctgatcagcgaggaagacctctctaccgaggatgaaggcgaggacccctggtatcaaaaagcatgcaagtgcgattgccaaggaggacccaatgctctgtggtctgcaggtgccacctccttggactgtataccagaatgcccatatcacaagcctctgggtttcgagtcaggggaggtcacaccggaccagatcacctgctctaacccggagcagtatgtgggctggtattcttcgtggactgcaaacaaggcccggctcaacagtcaaggctttgggtgtgcctggctctccaagttccaggacagtagccagtggttacagatagatctgaaggagatcaaagtgatttcagggatcctcacccaggggcgctgtgacatcgatgagtggatgaccaagtacagcgtgcagtacaggaccgatgagcgcctgaactggatttactacaaggaccagactggaaacaaccgggtcttctatggcaactcggaccgcacctccacggttcagaacctgctgcggccccccatcatctcccgcttcatccgcctcatcccgctgggctggcacgtccgcattgccatccggatggagctgctggagtgcgtcagcaagtgtgcctgaagcttctagagcctcgactgtgccttctagttgccagccatctgttgtttgcccctcccccgtgccttccttgaccctggaaggtgccactcccactgtcctttcctaataaaatgaggaaattgcatcgcattgtctgagtaggtgtcattctattctggggggtggggtggggcaggacagcaagggggaggattgggaagagaatagcaggcatgctggggaaaaatttagggttagggttagggttagggaaaaatttagggttagggttagggttagggaaaaatttagggttagggttagggttaggg

SEQ ID NO: 250 - DNA, 1697 bp, synthetic construct
  source 1..1697: mol_type = other DNA
tggaggcagaggagaaggcccaggcttcccagcagggctaaggatatgcaaggagtgcattcatccggaggtgttggcagcatcccagccccaccccattctcatcgtaaatcaggctcacttccattggctgcatacggtggagtgatgtgaccatatgtcacttgagcattacacaaatcctaatgagctaaaaatatgtttgttttagctaattgacctctttggccttcataaagcgggccccagaagcctggtggttgtttgtccttctcaggggaaaagtgaggcggccccttggaggaaggggccgggcagaatgatctaatcggattccaagcagctcaggggattgtctttttctagcaccttcttgccactcctaagcgtcctccgtgaccccggctgggatttagcctggtgctgtgtcagccccgggctcccaggggcttcccagtggtccccaggaaccctcgacagggccagggcgtctctctcgtccagcaagggcagggacgggccacaggccaagggcaccggagccccggctctgactgaccgcgttactcccacaggtgagcgggcggtttaagggaaggttggttggtggggtattaatctttaattacctggagcacctgcctgaaatcactttttttcaggttggaccggtccaccatgagccgcaagatagaaggctttttgttattacttctctttggctatgaagccacattgggattatcggagcagaagctgatcagcgaggaagacctctctaccgaggatgaaggcgaggacccctggtatcaaaaagcatgcaagtgcgattgccaaggaggacccaatgctctgtggtctgcaggtgccacctccttggactgtataccagaatgcccatatcacaagcctctgggtttcgagtcaggggaggtcacaccggaccagatcacctgctctaacccggagcagtatgtgggctggtattcttcgtggactgcaaacaaggcccggctcaacagtcaaggctttgggtgtgcctggctctccaagttccaggacagtagccagtggttacagatagatctgaaggagatcaaagtgatttcagggatcctcacccaggggcgctgtgacatcgatgagtggatgaccaagtacagcgtgcagtacaggaccgatgagcgcctgaactggatttactacaaggaccagactggaaacaaccgggtcttctatggcaactcggaccgcacctccacggttcagaacctgctgcggccccccatcatctcccgcttcatccgcctcatcccgctgggctggcacgtccgcattgccatccggatggagctgctggagtgcgtcagcaagtgtgcctgaagcttctagagcctcgactgtgccttctagttgccagccatctgttgtttgcccctcccccgtgccttccttgaccctggaaggtgccactcccactgtcctttcctaataaaatgaggaaattgcatcgcattgtctgagtaggtgtcattctattctggggggtggggtggggcaggacagcaagggggaggattgggaagagaatagcaggcatgctggggaaaaatttagggttagggttagggttagggaaaaatttagggttagggttagggttagggaaaaatttagggttagggttagggttaggg

SEQ ID NO: 251 - DNA, 2216 bp, synthetic construct
  source 1..2216: mol_type = other DNA
cgttacataacttacggtaaatggcccgcctggctgaccgcccaacgacccccgcccattgacgtcaatagtaacgccaatagggactttccattgacgtcaatgggtggagtatttacggtaaactgcccacttggcagtacatcaagtgtatcatatgccaagtacgccccctattgacgtcaatgacggtaaatggcccgcctggcattgtgcccagtacatgaccttatgggactttcctacttggcagtacatctacgtattagtcatcgctattaccatggtcgaggtgagccccacgttctgcttcactctccccatctcccccccctccccacccccaattttgtatttatttattttttaattattttgtgcagcgatgggggcggggggggggggggggcgcgcgccaggcggggcggggcggggcgaggggcggggcggggcgaggcggagaggtgcggcggcagccaatcagagcggcgcgctccgaaagtttccttttatggcgaggcggcggcggcggcggccctataaaaagcgaagcgcgcggcgggcgggagtcgctgcgacgctgccttcgccccgtgccccgctccgccgccgcctcgcgccgcccgccccggctctgactgaccgcgttactcccacaggtgagcgggcgggacggcccttctcctccgggctgtaattagctgagctttaagggaaggttggttggtggggtattaatctttaattacctggagcacctgcctgaaatcactttttttcaggttggaccggtccaccatgagccgcaagatagaaggctttttgttattacttctctttggctatgaagccacattgggattatcggagcagaagctgatcagcgaggaagacctctctaccgaggatgaaggcgaggacccctggtatcaaaaagcatgcaagtgcgattgccaaggaggacccaatgctctgtggtctgcaggtgccacctccttggactgtataccagaatgcccatatcacaagcctctgggtttcgagtcaggggaggtcacaccggaccagatcacctgctctaacccggagcagtatgtgggctggtattcttcgtggactgcaaacaaggcccggctcaacagtcaaggctttgggtgtgcctggctctccaagttccaggacagtagccagtggttacagatagatctgaaggagatcaaagtgatttcagggatcctcacccaggggcgctgtgacatcgatgagtggatgaccaagtacagcgtgcagtacaggaccgatgagcgcctgaactggatttactacaaggaccagactggaaacaaccgggtcttctatggcaactcggaccgcacctccacggttcagaacctgctgcggccccccatcatctcccgcttcatccgcctcatcccgctgggctggcacgtccgcattgccatccggatggagctgctggagtgcgtcagcaagtgtgcctgaagcttctagagcctcgactgtgccttctagttgccagccatctgttgtttgcccctcccccgtgccttccttgaccctggaaggtgccactcccactgtcctttcctaataaaatgaggaaattgcatcgcattgtctgagtaggtgtcattctattctggggggtggggtggggcaggacagcaagggggaggattgggaagagaatagcagaaattatctctaaggcatgtgaactggctgtcttggttttcatctgtacttcatctgctacctctgtgacctgaaacatatttataattccattaagctgtgcatatgatagatttatcatatgtattttccttaaaggatttttgtaagaactaattgaattgatacctgtaaagtctttatcacactacccaataaataataaatctctttgttcagctctctgtttctataaatatgtaccagttttattgtttttagtggtagtgattttattctctttctatatatatacacacacatgtgtgcattcataaatatatacaatttttatgaataaaaaattattagcaatcaatattgaaaaccactgatttttgtttatgtgagcaaacagcagcatgctggggaaaaatttagggttagggttagggttagggaaaaatttagggttagggttagggttagggaaaaatttagggttagggttagggttaggg

SEQ ID NO: 252 - DNA, 2096 bp, synthetic construct
  source 1..2096: mol_type = other DNA
tggaggcagaggagaaggcccaggcttcccagcagggctaaggatatgcaaggagtgcattcatccggaggtgttggcagcatcccagccccaccccattctcatcgtaaatcaggctcacttccattggctgcatacggtggagtgatgtgaccatatgtcacttgagcattacacaaatcctaatgagctaaaaatatgtttgttttagctaattgacctctttggccttcataaagcgggccccagaagcctggtggttgtttgtccttctcaggggaaaagtgaggcggccccttggaggaaggggccgggcagaatgatctaatcggattccaagcagctcaggggattgtctttttctagcaccttcttgccactcctaagcgtcctccgtgaccccggctgggatttagcctggtgctgtgtcagccccgggctcccaggggcttcccagtggtccccaggaaccctcgacagggccagggcgtctctctcgtccagcaagggcagggacgggccacaggccaagggcaccggagccccggctctgactgaccgcgttactcccacaggtgagcgggcggtttaagggaaggttggttggtggggtattaatctttaattacctggagcacctgcctgaaatcactttttttcaggttggaccggtccaccatgagccgcaagatagaaggctttttgttattacttctctttggctatgaagccacattgggattatcggagcagaagctgatcagcgaggaagacctctctaccgaggatgaaggcgaggacccctggtatcaaaaagcatgcaagtgcgattgccaaggaggacccaatgctctgtggtctgcaggtgccacctccttggactgtataccagaatgcccatatcacaagcctctgggtttcgagtcaggggaggtcacaccggaccagatcacctgctctaacccggagcagtatgtgggctggtattcttcgtggactgcaaacaaggcccggctcaacagtcaaggctttgggtgtgcctggctctccaagttccaggacagtagccagtggttacagatagatctgaaggagatcaaagtgatttcagggatcctcacccaggggcgctgtgacatcgatgagtggatgaccaagtacagcgtgcagtacaggaccgatgagcgcctgaactggatttactacaaggaccagactggaaacaaccgggtcttctatggcaactcggaccgcacctccacggttcagaacctgctgcggccccccatcatctcccgcttcatccgcctcatcccgctgggctggcacgtccgcattgccatccggatggagctgctggagtgcgtcagcaagtgtgcctgaagcttctagagcctcgactgtgccttctagttgccagccatctgttgtttgcccctcccccgtgccttccttgaccctggaaggtgccactcccactgtcctttcctaataaaatgaggaaattgcatcgcattgtctgagtaggtgtcattctattctggggggtggggtggggcaggacagcaagggggaggattgggaagagaatagcagaaattatctctaaggcatgtgaactggctgtcttggttttcatctgtacttcatctgctacctctgtgacctgaaacatatttataattccattaagctgtgcatatgatagatttatcatatgtattttccttaaaggatttttgtaagaactaattgaattgatacctgtaaagtctttatcacactacccaataaataataaatctctttgttcagctctctgtttctataaatatgtaccagttttattgtttttagtggtagtgattttattctctttctatatatatacacacacatgtgtgcattcataaatatatacaatttttatgaataaaaaattattagcaatcaatattgaaaaccactgatttttgtttatgtgagcaaacagcagcatgctggggaaaaatttagggttagggttagggttagggaaaaatttagggttagggttagggttagggaaaaatttagggttagggttagggttaggg

SEQ ID NO: 253 - DNA, 130 bp, synthetic construct
  source 1..130: mol_type = other DNA
cctgcaggcagctgcgcgctcgctcgctcactgaggccgcccgggcgtcgggcgacctttggtcgcccggcctcagtgagcgagcgagcgcgcagagagggagtggccaactccatcactaggggttcct

SEQ ID NO: 254 - DNA, 143 bp, synthetic construct
  source 1..143: mol_type = other DNA
ggccactccctctctgcgcgctcgctcgctcactgaggccgcccgggcaaagcccgggcgtcgggcgacctttggtcgcccggcctcagtgagcgagcgagcgcgcagagagggagtggccaactccatcactaggggttcct

SEQ ID NO: 255 - DNA, 95 bp, synthetic construct
  source 1..95: mol_type = other DNA
ctgcgcgctcgctcgctcactgaggccgcccgggcaaagcccgggcgtcgggcgacctttggtcgcccggcctcagtgagcgagcgagcgcgcag

SEQ ID NO: 256 - DNA, 130 bp, synthetic construct
  source 1..130: mol_type = other DNA
aggaacccctagtgatggagttggccactccctctctgcgcgctcgctcgctcactgaggccgggcgaccaaaggtcgcccgacgcccgggctttgcccgggcggcctcagtgagcgagcgagcgcgcag

1.-119. (canceled)

120. A nucleic acid comprising, in 5′ to 3′ orientation:
(a) a first AAV inverted terminal repeat,
(b) a promoter,
(c) a heterologous nucleic acid encoding Retinoschisin 1 (RS1),
(d) a polyadenylation signal, and
(e) a second AAV inverted terminal repeat,
wherein the nucleic acid comprises an IRBP enhancer sequence upstream of the promoter, wherein the IRBP enhancer sequence has at least 90%, at least 95%, at least 97%, at least 98%, at least 99%, or 100% identity to SEQ ID NO: 199.

121. The nucleic acid of claim 120, wherein the IRBP enhancer sequence is located immediately upstream of the promoter, without any additional nucleotide in between.

122. The nucleic acid of claim 120, wherein the promoter is a RK promoter comprising a sequence having at least 90%, at least 95%, at least 97%, at least 98%, at least 99%, or 100% identity to SEQ ID NO: 196.

123. The nucleic acid of claim 120, wherein the nucleic acid comprises a CVA-MVM intron sequence having at least 90%, at least 95%, at least 97%, at least 98%, at least 99%, or 100% identity to SEQ ID NO: 226, and wherein the CVA-MVM intron sequence is located between the promoter and the heterologous nucleic acid encoding RS1.

124. The nucleic acid of claim 120, wherein the heterologous nucleic acid encoding RS1 comprises a sequence having at least 90%, at least 95%, at least 97%, at least 98%, at least 99%, or 100% identity to SEQ ID NO: 117.

125. The nucleic acid of claim 124, wherein the heterologous nucleic acid encodes an RS1 protein comprising an amino acid sequence having at least 90%, at least 95%, at least 97%, at least 98%, at least 99%, or 100% identity to SEQ ID NO: 143.

126. The nucleic acid of claim 120, wherein the polyadenylation signal comprises a sequence having at least 90%, at least 95%, at least 97%, at least 98%, at least 99%, or 100% identity to SEQ ID NO: 225.

127. The nucleic acid of claim 120, wherein the first AAV inverted terminal repeat comprises or consists of a sequence having at least 90%, at least 95%, at least 97%, at least 98%, at least 99%, or 100% identity to SEQ ID NO: 255, and/or wherein the second AAV inverted terminal repeat comprises or consists of a sequence having at least 90%, at least 95%, at least 97%, at least 98%, at least 99%, or 100% identity to SEQ ID NO: 256.

128. The nucleic acid of claim 120, wherein the nucleic acid comprises, in 5′ to 3′ orientation:
(a) the first AAV inverted terminal repeat,
(b) the IRBP enhancer sequence having at least 90%, at least 95%, at least 97%, at least 98%, at least 99%, or 100% identity to SEQ ID NO: 199,
(c) an RK promoter comprising a sequence having at least 90%, at least 95%, at least 97%, at least 98%, at least 99%, or 100% identity to SEQ ID NO: 196,
(d) the heterologous nucleic acid encoding RS1,
(e) the polyadenylation signal comprising a sequence having at least 90%, at least 95%, at least 97%, at least 98%, at least 99%, or 100% identity to SEQ ID NO: 225, and
(f) the second AAV inverted terminal repeat.

129. The nucleic acid of claim 128, comprising a sequence having 100% identity to SEQ ID NO: 224.

130. A vector or an AAV vector genome comprising the nucleic acid of claim 120.

131. An AAV viral vector comprising the AAV vector genome of claim 130.

132. The AAV viral vector of claim 131, wherein the AAV viral vector comprises an AAV capsid protein comprising an amino acid sequence that is at least 95%, at least 98%, at least 99%, at least 99.5%, or 100% identical to SEQ ID NO: 2.

133. A method of expressing Retinoschisin 1 (RS1) in a retinal cell, comprising transducing the retinal cell with the AAV viral vector of claim 131.

134. A method of treating a disease or disorder in a subject in need thereof, comprising administering the AAV viral vector of claim 131 to the subject.

135. The method of claim 134, wherein the AAV viral vector is administered to the subject para-retinally, or sub-retinally.

136. The method of claim 135, wherein the AAV viral vector is administered at a dose of about 10¹⁰ to about 10¹² viral genome (vg).

137. The method of claim 134, wherein the disease or disorder is X-linked Retinoschisis (XLRS).

138. A nucleic acid comprising, in 5′ to 3′ orientation:
(a) a first AAV inverted terminal repeat,
(b) a promoter,
(c) a heterologous nucleic acid encoding Opa1,
(d) a polyadenylation signal, and
(e) a second AAV inverted terminal repeat.

139. A method of treating a disease or disorder in a subject in need thereof, comprising administering a vector comprising the nucleic acid of claim 138 to the subject.
